(19) United States
(12) Patent Application Publication
(10) Pub. No.: US 2021/0084934 A1
(43) Pub. Date: Mar. 25, 2021

(54) FEED ADDITIVE FOR INCREASING VITAMINE E ABSORPTION

(71) Applicant: DSM IP ASSETS B.V., Heerlen (NL)

(72) Inventors: Estefania PEREZ CALVO, Kaiseraugst (CH); Aurélia Anne Catherine Charlotte SÉON ép. SIMON, Kaiseraugst (CH)

(21) Appl. No.: 17/022,416

(22) Filed: Sep. 16, 2020

(30) Foreign Application Priority Data
Sep. 19, 2019 (EP) 19198414.5

(51) Int. Cl. A23K 10/18; A23K 50/30

(52) U.S. Cl. CPC A23K 10/18; C12R 1/10; A23K 50/30

(57) ABSTRACT

It has been found that administering probiotic Bacillus strains to animals improves vitamin E absorption. Thus, probiotic Bacillus strains can be used when animals are stressed, e.g. during weaning. The present invention relates to a Bacillus strain as a feed additive, which is useful for improving vitamin E absorption in animals.

### REFERENCE TO A SEQUENCE LISTING

[0001] This application contains a Sequence Listing in computer readable form, which is incorporated herein by reference.

### FIELD OF THE INVENTION

[0002] The present invention generally relates to the field of meat producing animals. In particular, it relates to a food supplementation composition for meat producing animals containing one or more probiotic Bacillus strains. More particularly, the invention relates to a food supplementation composition containing the above-mentioned ingredients for the improvement of vitamin E absorption in the meat producing animal, more specifically a swine.

### BACKGROUND OF THE INVENTION

[0003] The pig experiences biological stress when being weaned from the sow. During this time, pigs are subjected to a number of stressors, such as an abrupt separation from the sow, relocation and handling stress, a radical change in diet, social hierarchy stress, mixing with piglets from other litters, a novel physical environment, increased exposure to pathogens and dietary or environmental antigens. This process can predispose the pig to intestinal and immune system dysfunctions and result in reduced pig health, growth, feed intake and increased mortality, particularly during the first week after weaning. These problems occurring after weaning are widely spread and cause severe economic losses to the pig producer. It is therefore important to ameliorate stress-induced problems in the pig.

### SUMMARY OF THE INVENTION

[0004] Pigs are naturally stressed during and after weaning and susceptible to stress-induced problems in health and performance. To avoid economic losses to the pig producer, it is imperative to minimize the impact of stress on performance in the pig. Nutrition plays an important role in in stress control in young pigs. Antioxidants, in particular vitamin E, are known to support immune function and help the pig to cope with stress and the linked suppression of the immune system. Therefore, a good absorption of Vit E from the diet is highly relevant for the health status and performance of the animals. In accordance with the present invention it has now been found that vitamin E absorption can be substantially increased by administering to the animals an effective amount of one or more probiotic Bacillus strains.

[0005] The present invention relates to the use of one or more probiotic Bacillus strains in the manufacture of a food composition for the improvement of vitamin E absorption in the meat producing animal, more specifically a swine, most specifically a weaned piglet, compared to untreated animals.

[0006] More particularly, the invention relates to the use of one or more probiotic Bacillus strains chosen from the group of Bacillus subtilis and Bacillus licheniformis in the manufacture of a food composition for the improvement of vitamin E absorption in the meat producing animal, more specifically a swine, most specifically a weaned piglet, compared to untreated animals. According to the present invention the improvement of vitamin E absorption is characterized by an increase of vitamin E in the plasma by at least 20%, more preferably by at least 30%, more preferably by at least 40%, more preferably by at least 50% and most preferably by at least 60%, for example 63%.

[0007] According to the present invention the improvement of vitamin E absorption is characterized by an increase of vitamin E in the plasma to a value above 900 [ng/ml], most preferably above 1000 [ng/ml], for example 1051 [ng/ml].

[0008] In another aspect, the invention relates to a method for the improvement of vitamin E absorption in a meat producing animal, more specifically a swine, most specifically a weaned piglet, which comprises administering to an animal in need of such treatment one or more probiotic Bacillus strains.

[0009] In a more specific embodiment, the invention relates to a method for the improvement of vitamin E absorption in a meat producing animal, more specifically a swine, most specifically a weaned piglet, which comprises administering to an animal in need of such treatment one or more probiotic Bacillus strains chosen from the group of Bacillus subtilis and Bacillus licheniformis.

[0010] More specifically, the invention relates to a method for improving vitamin E absorption in the plasma of a meat producing animal, more specifically a swine, most specifically a weaned piglet to a value above 900 [ng/ml], most preferably above 1000 [ng/ml], for example 1051 [ng/ml], which comprises administering to an animal in need of such treatment one or more probiotic Bacillus strains.

[0011] More specifically, the invention relates to a method for improving vitamin E absorption in the plasma of a meat producing animal, more specifically a swine, most specifically a weaned piglet to a value above 900 [ng/ml], most preferably above 1000 [ng/ml], for example 1051 [ng/ml], which comprises administering to an animal in need of such treatment one or more probiotic Bacillus strains chosen from the group of Bacillus subtilis and Bacillus licheniformis. More specifically, the invention relates to a method for improving vitamin E absorption in the plasma of a meat producing animal, more specifically a swine, most specifically a weaned piglet by at least 20%, more preferably by at least 30%, more preferably by at least 40%%, more preferably by at least 50% and most preferably by at least 60%, which comprises administering to an animal in need of such treatment one or more probiotic Bacillus strains. More specifically, the invention relates to a method for improving vitamin E absorption in the plasma of a meat producing animal, more specifically a swine, most specifically a weaned piglet by at least 20%, more preferably by at least 30%, more preferably by at least 40%%, more preferably by at least 50% and most preferably by at least 60%, which comprises administering to an animal in need of such treatment one or more probiotic Bacillus strains chosen from the group of Bacillus subtilis and Bacillus licheniformis.

[0012] A feed supplementation composition containing one or more probiotic Bacillus strains is therefore one preferred embodiment of the present invention.

[0013] In one preferred embodiment of the invention the one or more probiotic Bacillus strains is chosen from the group of Bacillus subtilis and Bacillus licheniformis.

[0014] According to the present invention the preferred animal is a monogastric animal, more specifically a meat producing animal, more specifically a swine, most specifically a weaned piglet.

[0015] According to the present invention one or more probiotic Bacillus strains are suitably administered together with the feed. Feed may be supplemented by admixing one or more of the probiotic Bacillus strains according to the present invention to regular feed or by first preparing a premix of a feed component and one or more probiotic Bacillus strains and subsequent mixing the premix with other feed components. The feed can be any conventional animal feed. The terms “feed” or “feed composition” as used herein comprise solid and liquid food as well as drinking fluids such as drinking water.

[0016] Generally, one or more probiotic Bacillus strains is added to the feed in an amount required to administer at least 10⁴-10⁸ CFU, preferably 10⁵-10⁸ CFU, more preferably 10⁵-10⁷ CFU per kg body weight of an individual animal per day.

[0017] More specifically, in the manufacture of an animal feed in accordance with the invention, from about 10⁷ CFU/kg of one or more probiotic Bacillus strains, preferably from about 10⁷ CFU/kg to about 10⁹ CFU/kg of one or more probiotic Bacillus strains, most preferably from about 10⁷ CFU/kg to about 10⁹ CFU/kg of one or more probiotic Bacillus strains are suitably added to regular animal feed.

[0018] In a further embodiment, the invention is a feed wherein the vitamin E content is reduced below 95%, preferably below 90%, preferably below 85%, preferably below 80%, more preferably below 75%, more preferably below 70%, more preferably below 65%%, more preferably below 60%, more preferably below 55%, more preferably below 50%, more preferably below 45%, more preferably below 40%, more preferably below 35%, more preferably below 30% of the recommended standard values in animal feed, dependent on factors such as species and age.

[0019] More specifically, the invention is a feed wherein the vitamin E content is reduced below 300 mg/kg feed, preferably below 250 mg/kg feed, preferably below 200 mg/kg feed, more preferably below 150 mg/kg feed and most preferably below 100 mg/kg feed for broiler starters.

[0020] More specifically, the invention is a feed wherein the vitamin E content is reduced below 100 mg/kg feed, more preferably below 50 mg/kg feed for broiler growers and broiler finishers. More specifically, the invention is a feed wherein the vitamin E content is reduced below 100 mg/kg feed, more preferably below 80 mg/kg feed for broiler growers and broiler breeder starters and growers.

[0021] More specifically, the invention is a feed wherein the vitamin E content is reduced below 150 mg/kg feed, more preferably below 100 mg/kg feed for broiler growers and broiler breeder layers and male breeders.

[0022] More specifically, the invention is a feed wherein the vitamin E content is reduced below 100 mg/kg feed, preferably below 50 mg/kg feed and most preferably below 40 mg/kg feed for Hen and duck starters.

[0023] More specifically, the invention is a feed wherein the vitamin E content is reduced below 35 mg/kg feed, preferably below 30 mg/kg feed for Hen and duck rearers.

[0024] More specifically, the invention is a feed wherein the vitamin E content is reduced below 30 mg/kg feed, preferably below 25 mg/kg feed and most preferably below 20 mg/kg feed for Hen and duck layers.

[0025] More specifically, the invention is a feed wherein the vitamin E content is reduced below 100 mg/kg feed, more preferably below 50 mg/kg feed for layer breeders (growers, layers and male breeders).

[0026] More specifically, the invention is a feed wherein the vitamin E content is reduced below 80 mg/kg feed, preferably below 50 mg/kg feed and most preferably below 40 mg/kg feed for duck and geese.

[0027] More specifically, the invention is a feed wherein the vitamin E content is reduced below 80 mg/kg feed, preferably below 50 mg/kg feed for Partridges, quails and pheasants.

[0028] More specifically, the invention is a feed wherein the vitamin E content is reduced below 60 mg/kg feed, preferably below 50 mg/kg feed and most preferably below 40 mg/kg feed for ostriches and emus.

[0029] More specifically, the invention is a feed wherein the vitamin E content is reduced below 250 mg/kg feed, preferably below 200 mg/kg feed, preferably below 150 mg/kg feed, and most preferably below 100 mg/kg feed for turkey starters.

[0030] More specifically, the invention is a feed wherein the vitamin E content is reduced below 80 mg/kg feed, preferably below 60 mg/kg feed for turkey growers.

[0031] More specifically, the invention is a feed wherein the vitamin E content is reduced below 50 mg/kg feed, preferably below 30 mg/kg feed for turkey finishers.

[0032] More specifically, the invention is a feed wherein the vitamin E content is reduced below 250 mg/kg feed, preferably below 200 mg/kg feed, preferably below 150 mg/kg feed, and most preferably below 100 mg/kg feed for turkey breeder starters.

[0033] More specifically, the invention is a feed wherein the vitamin E content is reduced below 80 mg/kg feed, preferably below 60 mg/kg feed for turkey breeder growers.

[0034] More specifically, the invention is a feed wherein the vitamin E content is reduced below 150 mg/kg feed, preferably below 100 mg/kg feed for turkey breeder layers and male breeders.

[0035] More specifically, the invention is a feed wherein the vitamin E content is reduced below 150 mg/kg feed, preferably below 100 mg/kg feed for fattening pig pre-starters and starters.

[0036] More specifically, the invention is a feed wherein the vitamin E content is reduced below 100 mg/kg feed, preferably below 60 mg/kg feed for fattening pig growers and finishers.

[0037] More specifically, the invention is a feed wherein the vitamin E content is reduced below 100 mg/kg feed, preferably below 80 mg/kg feed for swine breeder replacement gilts.

[0038] More specifically, the invention is a feed wherein the vitamin E content is reduced below 150 mg/kg feed, preferably below 100 mg/kg feed for sows and boars.

[0039] In a further preferred embodiment of the present invention the composition is a feed premix, i.e. one or more probiotic Bacillus strains according to the present invention are—e.g. as a formulated powder—added to other minerals, vitamins, amino acids and/or trace elements in a higher concentration in order to form the premix. For use the premix is added to and thoroughly mixed with a regular animal feed to achieve even distribution therein. Such a premix can comprise active ingredients, e.g., in a concentration of from about 1 mg/kg to about 10 000 mg/kg, preferably from about 100 mg/kg to about 10 000 mg/kg, more preferably from about 200 mg/kg to about 8 000 mg/kg, most preferably from about 500 mg/kg to about 7 000 mg/kg of one or more probiotic Bacillus strains. If one kg of such premix is added per 100 kg of regular feed this would typically meet the individual need of the animal by normal feed consumption.

[0040] For optimum results, the probiotic Bacillus strain supplementation should be part of a diet which contains an adequate supply of nutrients, generally known to be of benefit to the organism.

[0041] If more than one probiotic Bacillus strain is added to the feed composition, their individual amounts in a dry food composition should be adapted accordingly.

[0042] According to the present invention it is further advantageous if the composition also contains one or more of the following ingredients: Vitamin A, Vitamin E, Biotin, copper (e.g. as CuSO₄), zinc (e.g. as ZnSO₄), cobalt (e.g. as CoSO₄), selenium (e.g. as Na₂SeO₃), iodine (e.g. as KI), manganese (e.g. as MnSO₄) and/or calcium (e.g. as CaSO₄). It is preferred to use calcium sulphate as calcium carrier in a composition according to the present invention.

[0043] When the composition is prepared in the form of a premix the premix preferably comprises from 10⁹ CFU/g composition, preferably in an amount from 10⁸ CFU/g composition, most preferably in an amount from 2×10⁸ CFU/g composition one or more probiotic Bacillus strains, and further from 80,000 to 120,000 IU Vitamin A, from 1000 to 3000 IU Vitamin E, from 10 to 20 mg Biotin, from 200 to 300 mg copper (as CuSO₄), from 300 to 600 mg zinc (as ZnSO₄), from 5 to 10 mg cobalt (as CoSO₄), from 1 to 6 mg selenium (as Na₂SeO₃), from 5 to 10 mg iodine (as KI) and/or from 200 to 400 mg manganese (as MnSO₄) and may further comprise magnesium chloride or sulphate and sodium bicarbonate.

[0044] According to the present invention it is preferred to start administering one or more probiotic Bacillus strains at weaning.

### Definitions

[0045] BioPlus® YC: A mixture of Bacillus licheniformis DSMZ 5749 and Bacillus subtilis DSMZ 5750 is available as a commercial formulation under the Trademark BioPlus® YC.

[0046] Feed Additive: The term feed additive according to the invention refers to a formulation comprising one or more probiotic Bacillus strains chosen from the group of Bacillus subtilis and Bacillus licheniformis as active ingredient intended for intake by the animal.

[0047] Feed Premix: The incorporation of the composition of feed additives to animal feeds, is in practice carried out using a concentrate or a premix. A premix designates a preferably uniform mixture of one or more microingredients with diluent and/or carrier. Premixes are used to facilitate uniform dispersion of micro-ingredients in a larger mix. A premix according to the invention can be added to feed ingredients as solids (for example as water soluble powder) or liquids.

[0048] Feed: The term “Feed” refers to any compound, preparation, or mixture suitable for, or intended for intake by animals. The terms “feed” or “feed composition” as used herein comprise solid and liquid food as well as drinking fluids such as drinking water.

[0049] An animal feed for pigs typically comprises proteins, carbohydrates, fats, further probiotics, prebiotics, enzymes, vitamins, immune modulators, milk replacers, minerals, amino acids, acid-based products, medicines, and/or other combinations thereof. Typical feed ingredients include corn, Soybean meal, Soy protein, Potato proteins, Lactoserum, Soybean oil, fish meal, krill meal, soya concentrate, corn gluten, wheat gluten, pea protein, wheat flour, fish oil, a vitamin, mineral premix, mineral premix plus synthetic phosphorus and combinations thereof. The feed refers to a manufactured or artificial diet (i.e., formulated feed) to supplement or to replace natural feed, which is most commonly produced in form of mash or pellets. Such a feed typically comprises a carbohydrate source, a protein source and/or a lipid source, in the amounts of 15-30% (w/w) of a protein source, 65-80% (w/w) of a carbohydrate source and/or 3-5% (w/w) of a lipid source. The feed may further comprise ash, water and/or any combinations thereof. The feed may further comprise one or more ingredients selected from the group consisting of, a vitamin, mineral premix and combinations thereof.

[0050] Mutant strain: The term “mutant strain” used throughout refers to mutants that arise from a wild type Bacillus, such as BMSS whose genome is given in SEQ ID NO:1, with the intentional use of mutagens such as those known in the art, and preferably EMS. Such mutants may be obtained by classical methods, such as growing the Bacillus subtilis strain in the presence of UV light or in the presence of a certain antibiotic to which the parent is susceptible and testing any resistant mutants for improved biological activity or improved ability to enhance one or more of the indicia of animal health. Other methods for identifying mutants are known to those of ordinary skill in the art. But besides these preferred mutants all other kinds of mutants e.g., mutants obtained by genetic engineering, are also part of the current invention. The mutant strains of the current invention are preferably mutants of existing strains.

[0051] BMS1: BMS1 is a mutant strain from Bacillus licheniformis DSMZ 5749 possessing mutations alsS and dhbA (as defined below).

alsS (B. licheniformis BMS1)(wild type)
lnnvaaknetltvrgaelvvdsliqqgvthvfgipgakidavfdvlkdkg
pelivcrheqnaafnnaaavgrltgkpgvclvtsgpgasnlatglvtant
egdpvvalagavkradrlkkthqsmdnaalfqPITKYSAEVEDANNIPEA
VTNAFRAAASGQAGAAFLSFPQDVTAGPATAKPVKIMPAPKLGAASDEQI
SAAIAKIHNANLPVVLVGMKGGRPEAIEAVRRLLRKVKLPFVETYQAAGT
LSHDLEDQYFGRIGLFRNQPGDMLLEKADVVLTVGYDPIEYDPVFWNGKG
ERSVIHLDEIQADIDHDYQPEIELIGDIAETLNHIEHDSLPVSIDESFAP
VLDYLKKALEEQSEPPKETKTDLVHPLQIVRDLRELLSDDITVTCDIGSH
AIWMSRYFRTYRPHGLLISNGMQTLGVALPWAIAATLVNPGQKVVSVSGD
GGFLFSAMELETAVRLKAPIVHIVWNDSTYDMVAFQQEMKYKRTSGVDFG
GIDIVKYAESFGAKGLRVNSPDELAEVLKAGLDAEGPVVIDIPVDYSDNI
HLADQRFPKKFEEHFNKEASKQS*
dhbA (B. licheniformis BMS1)(wild type)
vkgkvalvtgasqgigkevalalagrgvfvaaadqnrkglleledeleqk
glqgsgfaadvgdsaavdqliadiereigpidmlvnvagvlrtglihsls
dedwektfnvnstgvfnvsravarrmvprrtgaivtvgsnaaavprnhna
ayaaskaaalmftkclglelaeynircniispgstdtpmqrslwqceeaa
qgviegsletfktgiplgklaspadiadavvfllsdgarhitmhd

[0052] BMS2: BMS2 is a Bacillus licheniformis strain with genome deposited under NRRL B-50134.

[0053] BMS3: BMS3 is a Bacillus subtilis strain with genome deposited under NRRL B-50105.

[0054] BMS4: BMS4 is a Bacillus subtilis strain with genome published under code NC_019896 (Schyns et al., 2013 in Genome announcements).

[0055] BMS5: BMS5 is a wild type Bacillus subtilis whose genome is SEQ. ID. NO.:1. Due to its length, it is not reproduced in print.

### BRIEF DESCRIPTION OF THE FIGURES

[0056] FIG. 1. Vitamin E absorption in plasma comparing weaned piglets fed control diet or a feed comprising dietary probiotic Bacillus strains at 5×10⁸ CFU/kg of feed compared to control basal diet fed pigs.

[0057] FIG. 2. Vitamin E absorption in plasma comparing weaned piglets fed control diet or a feed comprising dietary probiotic Bacillus strains at different concentrations compared to control basal diet fed pigs.

### DETAILED DESCRIPTION OF THE INVENTION

[0058] 1. The use of at least one Bacillus strain for improving vitamin E absorption in animals.
[0059] 2. The use of claim 1 wherein the animal is a monogastric animal.
[0060] 3. The use of claim 2 wherein the animal is a swine.
[0061] 4. The use of claim 3 wherein the animal is a weaned piglet.
[0062] 5. The Bacillus strain according to any of claims 1 to 4 wherein the strain is selected from the group of Bacillus subtilis and Bacillus licheniformis.
[0063] 6. The Bacillus strain according to any of claims 1 to 4 wherein the Bacillus strain composition comprises a strain chosen from the group of Bacillus subtilis BMS 3, BMS 4, BMS 5, DSMZ 5750 or Bacillus licheniformis BMS 1, BMS 2, DSMZ 5749 or a mutant of any of these strains.
[0064] 7. The use according to any of claims 1 to 6, wherein said Bacillus strain is administered in an amount of at least 10⁷ CFU/kg feed, preferably 10⁷-10¹⁰ CFU/kg feed, more preferably 10⁷-10⁹ CFU/kg feed.
[0065] 8. The use according to any of claims 1 to 7, wherein said Bacillus strain is administered in an amount of at least 10⁴-10⁸ CFU/kg body weight per day, preferably 10⁵-10⁸ CFU/kg body weight per day, more preferably 10⁵-10⁷ CFU/kg body weight per day.
[0066] 9. A method for improving vitamin E absorption in animals, said method comprises feeding to the animal at least one Bacillus strain.
[0067] 10. The method of claim 9 wherein the animal is a monogastric animal.
[0068] 11. The method of claim 10 wherein the animal is a swine.
[0069] 12. The method of claim 11 wherein the animal is a weaned piglet.
[0070] 13. The method according to any of claims 9 to 12 wherein the strain is selected from the group of Bacillus subtilis and Bacillus licheniformis.
[0071] 14. The method according to any of claims 9 to 13 wherein the Bacillus strain composition comprises a strain chosen from the group of Bacillus subtilis BMS 3, BMS 4, BMS 5, DSMZ 5750 or Bacillus licheniformis BMS 1, BMS 2, DSMZ 5749 or a mutant of any of these strains.
[0072] 15. The method according to any of claims 9 to 14, wherein said Bacillus strain is administered in an amount of at least 10⁷ CFU/kg feed, preferably 10⁷-10¹⁰ CFU/kg feed, more preferably 10⁷-10⁹ CFU/kg feed.
[0073] 16. The method according to any of claims 9 to 15, wherein said Bacillus strain is administered in an amount of at least 10⁴-10⁸ CFU/kg body weight per day, preferably 10⁵-10⁸ CFU/kg body weight per day, more preferably 10⁵-10⁷ CFU/kg body weight per day.
[0074] 17. An animal feed composition comprising at least one Bacillus strain of claim 1 or compounds obtained from the Bacillus of claim 1 for improving vitamin E absorption in animals.
[0075] 18. The feed composition of claim 17 wherein the animal is a monogastric animal.
[0076] 19. The feed composition of claim 18 wherein the animal is a swine.
[0077] 20. The feed composition of claim 19 wherein the animal is a weaned piglet.
[0078] 21. The feed composition according to any of claims 17 to 20 comprising the Bacillus strain of claim 1 or compounds obtained from the Bacillus of claim 1 in a concentration of at least 10⁷ CFU/kg feed, preferably 10⁷-10¹⁰ CFU/kg feed, more preferably 10⁷-10⁹ CFU/kg feed.
[0079] 22. The feed composition according to any of claims 17 to 21, wherein the feed composition further comprises one or more ingredients from the group consisting of a carbohydrate source, a protein source, a lipid source, ash, water and any combinations thereof and wherein the vitamin E content is reduced below 95%, preferably below 90%, preferably below 85%, preferably below 80%, more preferably below 75%, more preferably below 70%, more preferably below 65%%, more preferably below 60%, more preferably below 55%, more preferably below 50%, more preferably below 45%, more preferably below 40%, more preferably below 35%, more preferably below 30% of the recommended standard values in animal feed.
[0080] 23. The feed composition according to any of claims 17 to 21, comprising at least one further ingredient selected from the group consisting of: proteins, carbohydrates, fats, further probiotics, prebiotics, enzymes, vitamins, immune modulators, milk replacers, minerals, amino acids, acid-based products, medicines, and combinations thereof and wherein the vitamin E content is reduced below 95%, preferably below 90%, preferably below 85%, preferably below 80%, more preferably below 75%, more preferably below 70%, more preferably below 65%%, more preferably below 60%, more preferably below 55%, more preferably below 50%, more preferably below 45%, more preferably below 40%, more preferably below 35%, more preferably below 30% of the recommended standard values in animal feed.
[0081] 24. The feed composition according to any of claims 17 to 21, comprising at least one further ingredient selected from the group consisting of: corn, Soybean meal, Soy protein, Potato proteins, Lactoserum, Soybean oil, fish meal, krill meal, soya concentrate, corn gluten, wheat gluten, pea protein, wheat flour, fish oil, a vitamin, mineral premix, mineral premix plus synthetic phosphorus and combinations thereof and wherein the vitamin E content is reduced below 95%, preferably below 90%, preferably below 85%, preferably below 80%, more preferably below 75%, more preferably below 70%, more preferably below 65%%, more preferably below 60%, more preferably below 55%, more preferably below 50%, more preferably below 45%, more preferably below 40%, more preferably below 35%, more preferably below 30% of the recommended standard values in animal feed.
[0082] 25. The feed composition according to any claims 17 to 24, wherein the feed composition comprises from 15-30% (w/w) of a protein source.
[0083] 26. The feed composition according to claims 17 to 24, wherein the feed composition comprises from 65-80% (w/w) of a carbohydrate source.
[0084] 27. The feed composition according to claims 17 to 24, wherein the feed composition comprises from 3-5% (w/w) of a lipid source.

[0085] The invention is further illustrated by the following examples.

### Example 1

[0086] The first study evaluated dietary probiotic Bacillus strains at 5×10⁸ CFU/kg of feed compared to control basal diet fed pigs.

[0087] 144 male piglets (Large-White x Redon) were divided in groups of 4 piglets per treatment with 6 replicates per treatment (24 piglets/treatment) and fed pellets of sample or control diets ad libitum for 42 days. Vitamin E absorption in the plasma was measured after 21 days of treatment.

[0088] Treatment dosages are shown in table 1 and diet composition in table 2.

TABLE 1
Dosage [CFU/kg feed] of probiotic in treatments

| Treatment | Control | BMS1 | BMS2 | BMS3 | BMS4 | BMS5 |
|---|---|---|---|---|---|---|
| Dose | 0 | 5 × 10⁸ | 5 × 10⁸ | 5 × 10⁸ | 5 × 10⁸ | 5 × 10⁸ |
| [CFU/kg feed] | | | | | | |

TABLE 2
Composition of the diets

| Phase | D 1-7 | D 7-21 | D 21-42 |
|---|---|---|---|
| Ingredient inclusion | | | |
| (%) | | | |
| Corn | 52.80 | 55.05 | 60.20 |
| Soybean meal CP48 | 26.50 | 26.50 | 29.50 |
| Soy protein | 3.00 | 3.00 | 1.00 |
| concentrate | | | |
| Potato proteins | 2.00 | 2.00 | 0 |
| Lactoserum | 5.00 | 3.00 | 0 |
| Soybean oil | 4.15 | 4.15 | 3.00 |
| Vitamin &Trace | 3.00 | 3.00 | 3.00 |
| Mineral Premix | | | |
| Dicalcium phosphate | 1.90 | 1.90 | 1.90 |
| Calcium carbonate | 0.60 | 0.60 | 0.60 |
| L-Lys | 0.70 | 0.50 | 0.50 |
| L-Met | 0.15 | 0.10 | 0.10 |
| L-Thr | 0.05 | 0.05 | 0.05 |
| L-Trp | 0.05 | 0.05 | 0.05 |
| NaCl | 0.10 | 0.10 | 0.10 |
| Phytase (mg/kg) | 100 | 100 | 100 |
| Calculated Provision | | | |
| CP (%) | 20.6 | 20.4 | 19.1 |
| Metabolizable | 13.06 | 13.04 | 12.72 |
| Energy (MJ/kg) | | | |
| Analyzed content | | | |
| CP (%) | 21.27 ± 0.13 | 21.35 ± 0.24 | 19.25 ± 0.51 |
| Metabolizable | 14.79 ± 0.16 | 14.80 ± 0.13 | 14.37 ± 0.34 |
| Energy (MJ/kg) | | | |

[0089] The results are shown in Table 3 and FIG. 1. The probiotic treatment resulted in an increased vitamin E concentration in the plasma of at least 63%.

TABLE 3
Vitamin E content in plasma

| | Vit E in | Increase in |
|---|---|---|
| | plasma [ng/ml] | vitamine E [%] |
| Control | 810 | 0 |
| BMS1 | 1208 | 67 |
| BMS2 | 1152 | 70 |
| BMS3 | 1051 | 77 |
| BMS4 | 1276 | 63 |
| BMS5 | 1177 | 69 |

### Example 2

[0090] The second study evaluated dietary probiotic Bacillus strains at different dosages compared to control basal diet fed pigs.

[0091] 144 male piglets (Large-White x Redon) were divided in groups of 4 piglets per treatment with 9 replicates per treatment (36 piglets/treatment) and fed pellets of sample or control diets ad libitum for 42 days. Vitamin E absorption in the plasma was measured after 21 days of treatment.

[0092] Treatment dosages are shown in table 3 and diet composition in table 4.

TABLE 4
Dosage [CFU/kg feed] of probiotic in treatments

| Treatment | Control | BMS1 HD | BMS1 LD | BioPlus2B ® |
|---|---|---|---|---|
| Dose[CFU/kg feed] | 0 | 5 × 10⁸ | 1.6 × 10⁸ | 1.6 × 10⁸ |

TABLE 5
Composinon of the diets

| Phase | D 1-7 | D 7-21 | D 21-42 |
|---|---|---|---|
| Ingredient inclusion | | | |
| (%) | | | |
| Corn | 50.80 | 54.65 | 61.60 |
| Soybean meal CP48 | 28.00 | 28.40 | 29.00 |
| Soy protein | 5.00 | 3.00 | 2.00 |
| concentrate | | | |
| Potato proteins | 2.00 | 2.00 | 0 |
| Lactoserum | 5.00 | 3.00 | 0 |
| Soybean oil | 3.00 | 3.00 | 1.50 |
| Vitamin &Trace | 3.00 | 3.00 | 3.00 |
| Mineral Premix | | | |
| Dicalcium phosphate | 1.70 | 1.55 | 1.40 |
| Calcium carbonate | 0.60 | 0.60 | 0.70 |
| L-Lys | 0.60 | 0.50 | 0.50 |
| L-Met | 0.10 | 0.10 | 0.10 |
| L-Thr | 0.05 | 0.05 | 0.05 |
| L-Trp | 0.05 | 0.05 | 0.05 |
| NaCl | 0.10 | 0.10 | 0.10 |
| Phytase (mg/kg) | 100 | 100 | 100 |
| Chromium oxide | No | No | Yes |
| Calculated Provision | | | |
| CP (%) | 21.7 | 20.6 | 18.9 |
| Metabolizable | 13.45 | 13.52 | 13.30 |
| Energy (MJ/kg) | | | |
| Analyzed content | | | |
| CP (%) | 22.7 ± 0.2 | 21.4 ± 0.4 | 19.9 ± 0.4 |
| Metabolizable | 13.33 ± 0.1 | 13.311276 ± 0.1 | 13.09 ± 0.1 |
| Energy (MJ/kg) | | | |

[0093] The results are shown in Table 6 and FIG. 2. The probiotic treatment resulted in an increased vitamin E concentration in the plasma of at least 67%.

TABLE 6
Vitamin E content in plasma

| | Vit E in | Increase in |
|---|---|---|
| | plasma [ng/ml] | vitamine E [%] |
| Control | 893 | 0 |
| BMS1 LD | 1289 | 69 |
| BMS1 HD | 1279 | 70 |
| BioPlus2B ® | 1328 | 67 |

### Example 3

[0094] Recommended vitamin E contents for poultry are shown in table 7.

TABLE 7
Recommended vitamin E content in poultry feed

| | | | | Vit. E |
|---|---|---|---|---|
| Category | Phase | Duration | | [mg/kg feed] ⁽¹⁾ |
| Broilers | Starters | 1-10 | days | 150-300 ⁽²⁾ |
| | Growers | 11-24 | days | 50-100 ⁽³⁾ |
| | Finishers | 25 days - market | | 50-100 ⁽³⁾⁽⁴⁾ |
| Broiler | Starters & | 0-18 | wks | 80-100 ⁽²⁾ |
| | growers | | | |
| breeders | Layers & male | 19 wks - end | | 100-150 ⁽³⁾ |
| | breeders | | | |
| Hen & duck | Starters (pullets) | 0-10 | wks | 40-100 ⁽²⁾ |
| layers | Rearing (pullets) | 10 wks - 2% lay | | 30-35 |
| | Layers | Laying phase | | 20-30 ⁽³⁾ |
| Layer breeders | Growers, layers | 0 wks - end | | 50-100 ⁽³⁾ |
| | & male breeders | | | |
| Ducks & geese | | | | 40-80 |
| Partridged, quails | | | | 50-80 |
| & pheasants | | | | |
| Ostriches & emus | | | | 40-60 |
| Turkeys | Starters | 0-6 | wks | 100-250 ⁽²⁾ |
| | Growers | 7-12 | wks | 60-80 |
| | Finishers 1 | 13-18 | wks | 30-50 ⁽³⁾⁽⁴⁾ |
| | Finishers 2 | 18 wks - market | | 30-50 ⁽³⁾⁽⁴⁾ |
| Turkey breeders | Starters | 0-6 | wks | 100-250 ⁽²⁾ |
| | Growers | 7-29 | wks | 60-80 |

| | | |
|---|---|---|
| Layers & male | Laying phase | 100-150 ⁽³⁾ |
| breeders | | |

⁽¹⁾ When dietary fat is higher than 3% then add 5 mg/kg feed for each 1% dietary fat.
⁽²⁾ Higher level for optimum function.
⁽³⁾ Under heat stress conditions increase level up to 200 mg/kg feed.
⁽⁴⁾ For optimum meat quality increase level up to 200 mg/kg feed.

### Example 4

[0095] Recommended vitamin E contents for swine are shown in table 8.

TABLE 8
Recommended vitamin E content in swine feed

| | | | | Vit. E |
|---|---|---|---|---|
| Category | Phase | Duration | | [mg/kg feed] ⁽¹⁾ |
| Fattening pigs | Pre-starters | <5 | kg | 100-150 ⁽²⁾ |
| | Starters | 5-30 | kg | 100-150 |
| | Growers | 30-70 | kg | 60-100 |
| | Finishers | 70 kg - market | | 60-100 ⁽³⁾ |
| Breeders | Replacement gilts | | | 80-100 |
| | Sows | | | 100-150 ⁽⁴⁾ |
| | Boars | | | 100-150 |

⁽¹⁾ When dietary fat is higher than 3% then add 5 mg/kg feed for each 1% dietary fat.
⁽²⁾ For optimum immune health: additional 100 mg/kg feed.
⁽³⁾ For optimum meat quality: additional 150 mg/kg feed.
⁽⁴⁾ For optimum piglet health: during late pregnancy and lactation total 250 mg/kg feed.

The application's sequence listing, which the Patent Office published only in electronic form, follows.

SEQUENCE LISTING (1 sequence)

SEQ ID NO: 1 - DNA, 4118210 bp, Bacillus subtilis (residues 1-2,059,105 of 4,118,210)
attaggcacgccgccagcgttcgtcctgagccaggatcaaactctccgataaagtagtttgactgactacgcacatcgctgtgcgatttatttaaaactttgaattaacaggtacgttttgtcttgtttagttttcaaagatcattaccgcttgttgaagcagctttattatcttaccactcagcttcttttatgtcaacaacttttttcaagttgtttccgaagcttttcgttgttgtctgctgttcatcagcgacgtttaataatataacacccttttgaaaatatgacaatagtttttttaaaaaaatcattaattattttctttcatacttatttcagtttctcttctatagaaagataagctgtcttgtggtttggcatattttcttgtatagtaagattgaactaaatacttgatgaccacaaggggagcattaaagctgagagtgaacgttttgttctgaccctttgaacctgttagttaacgctggcgtagggatgtggcaaagccaaatgatttgcagtttatgcaagcagcgcgcggaccttttcccatccttccccgcgctgcttttttgtttatccttgttacggttgtctgaccagggggaaaactatgaatcattcaacacggcttgtgcgcttaattgaaatagcgattatgaccggggcggctgtcattctggacattgtctcaggtatgtttctccggatgccccaaggcggttcggtctctattatgatgattccgatttttttgatttcattccgctggggagtgaaagccgggcttacgacaggctttttgacagggattgtccagatcgccatcggcaatttgtttttgcagcacccggtgcagctatttcttgattacatcgcggcatttgcagtcctcggtttcagcggcttgtttgcttccggtgtacgggaatcggcattgaataaaaaaagaggcgctttaacgatgtatgttataggcggtgttttcatcggcagtgtgctgcgctatgcggcacatgtggtctccggagctgtctttttcggaagctatgctccgaagggcacgccggtctggatttattcgtccgtctataacgcgacttatatgattccttcttttatcctttcggccattgtccttatcttattattcatgactgcgccgcggcttcttgaagctaagcggacgaactgaaacagcaggcggtttacgcctgctgtttttttattccgggctgtgccgttcgtttgaatcactcagttcttttgtaagttcatttatactttgttttatgtttcctttacctgaaaaattctcaataagctcttttacattgattccggaagatgcttttaagctttcctgaagaccggccattaaattggttgcgtagcctgtgactttattggccccgctgttttcaccgcttcctcccgtatcaacgacggttattttatcaatgttggaaagaggcgctgagacttgcttcgcatattcaggcagcattttcacaatcatatcaaggattgcagcctgcccgtatttttcgaatgcttcggcgattttttctttagcttccgcttctgcgagtcctttcaggcggatgacttccgcttcggtttctcctctcgccttttcagcctccgctttagcaagaccgtcaattctcacgcgttccgcttccgccttggccatcgcttcgatgctgtactgctcggcatccgcttctgcgagctgcttcgcttttgcggctgcagccgcttgttccaccgagtaacggtcggcatcggcttttttcttcacttcagagtcatattggcgctcacggcgcagaatttctttttcctccaattcaatctgcttttgccgctcaataattttaatttgcatttcctgctctgtcacctgctggcgggcttttgctgtttcaagatcatatgcctggtcggcattggcttttgctgtatcctgctctcttctgtattccgccattttcagctgattgattttttccgcttcagctatttccgtcgcccgctccagctctgatttttttgcgtctttatcagcggccgcacgtttaatcctcgtctctttatccgcttctgccgtggcaatgtccgcatcccgcttgacttgggcgattctcggcttacctaatgattcaagatagccgtttttatcgcggacgtctttaatcgtaaaagaaacgatcacgagccccattttagcaagatcctgagacgcgacccgctggacttcctgagaaaacttttccctgtttttataaatctcttcaacggtcatggagccgaggatggagcgcagatggccttccagcacctcccgcgcctcctgctcacggtcgtccttagatttccccaaaaattgttcagctgctgtggcgatttcaccgatggagcctccgattttaataatggcggttccgtcggccattaccggcacgccttgctctgtatagacttcgggtgtagagacatcaagtttgcttgacagtaaactgagaggttctgcctgctggaataccgggagcacgaacgttcccccgccccggacgattttcagacgatttccgccttcatcaatgtggacgttcttatttcccaaataacttccggtcacgataagggcttcgtccggccccgctgtccggtacttcgtaataaatacagcaataagtgcgatgagtaaaaagaatacgattccgataacgatgataatcggcatagtcataacagttcccccttagatatcagattggttcatgcggcgtcacaaaaagcactccgtctttcacgtcaatcactaatacggcagttccgtacttgatctgttcttgatcaaagctgacggctgatttagaaatggcgccccctattccctctatgatcacttctccatagccgtctttcgggacggaagtaatgaccctgccgactctgccctttaaatccgtctcccgataagcgagcgattcttccgctgatgaaagcgggacaaggacgaagaagtgaagcaggctgaccaaaagaaccgaaagaacaaatgaaagcaacgcaatgacagaacttgatagcggagcggcgatttcgccgatataacctgaggctgaaaagattgttaaaaaagacagaatcaatgcagggtttaaaaatgaaacaggaatggcttccgagaggccgtgaaacacatcttgaaaaaacagaatcaaaagcgtgagacttcccgaaataatcaatgtgtaaagatagaccgtttcaagcggcagatgaaatatgtccatcttctatcctcctttcggccgaggtgtcggagtgttactttatatacggatgtaaaggtaaatggtttcaattttctgataaggaaggctgattacatgattatccaatccggatatgatatgtttactctaaaggaggagataggatgagcatttttaatgaagccagacagcagatctgggaagaactgaaaggactctctgatgaggaattcaaccgaaagcccgcggctgatgagtggagcgtgcgggaagtccttgaccatttaaagaaaattgacgaaacagcgcagacccttttatcaaagcaggcaaaagacgcaccgttaaaagaaatagaagaaaaaccgatggagtttatagaggacagaacagataaacggccggcgccgtcacacctcgaacctgagcaaaaccgattatcagtcattgaagcaaaacaagaattagatacggcaagacagcagctgaccgcagttatttcatcattaaacgaggaagactttgaacgtgtgcttccgcatcctgtttttcaagaactgacgatccgccagtggattgattttatcggccatcatgaaaagcgtcacattaatcaaataaaagaaatcaaacaaaaaatcgaaaaggtctagtcagaccttctcgatttttttcttggcgcgtttcggttcataagaatggatggtgaccgcatcgcccgtgcatatgtcacccgggcgttcaacaatacagacaattcctcttctgcccatcgcgtgcctcacaaacgccgcggcgagttttggctgatccggataaaaggattgaaagacttctcccggctgaatgcacggatcattttctccctcgcacaacagagacgcaccgctcggaaatatcattctgcttccttctttaagcggcgtcagtgcagaaaaaccgctgattgcgatgttagcgccgagccattcgggaaagatatgagaaatccccatcttctccgcaatgtcatcacattcctccatggacacgattgaaatctgtctccggttaaaaatttctgttcctctttcatacatcggctcacgcgcgccggccttttttgtcagtccgaaatgcaggtcaccgggaaacccgccgtattccgcacgaagcttgtccatctttttggtaacaaattgttcggtatccgctatatatacgccttccgtctttgctgttatgcgtttccacatcagccaccaccgcctttttcttgacattatccttaaaaaaccccgctctgtaaaggagcggggttcatttattataccgttttcggcgttaagtcaaagcagcgtttgtaaatccagttgtatgctttctcattcaaatctcttggattcccgaaagtttgcggatctttcatggcttcttttgataaacgttcaatcatgtccggagacacaccttgttcttctaaactcggcacctctaaatcttttacaagatcatacatccagttgacggacgcttttgccgcttcttcggttgtcatgttgcttgtatcgattccgaatgctttggcgatgcgggcgaatttttccggatagcctttccagttgtattccattaccggccccatcatagctgcgacgcattgtccgtgagcgacagggatgatgccgccgagcgtctggctcatcgcatgcgccgcgcctgctgattcactgccgtatgaaaggccggcaagcatcgccgcctgcgccatgccgtatcttgcttccaaatcctctccgtccgcaaacgagcgcttaatataatgcgccgcatattcaatggccattaaagcgacggcatcagtgatcggctgggcgaatttcatcgtatagcactcgatggcgtgcgcaagtgcgtcaatacctgtcatggccgtcacatgcggaggcatggacgtgtgcagctcagggtcaatgaccgttaaatgcgcggcgataagcggtccgcccgtattgaatttaaattctctttcttcatctgtaatgaccgcccattgtgtgacctctgaacctgttcccgcagtcgtcgggatcgttgtcagcggaggaatacggttttccagcggctttttgccttccgcggcttcataatcaagcacacttccttcgtgtgtcgcttctaccccgatcgctttcgctgtatccatggagcttccgccgccgacagccacaaggccgttgcagttttcttttttatacagttctgatccttcgtttacaagacgtacaggcgggttcggctccactttgttaaacaggacgacttcgatgcccgcttcctgcaaagattcaatgaccgggtttgccactcccgcgttataaattcccgggtctgttacgagcagcgcttttgtgacgccaagcgctctgacttcacttcccgcgtgctgaatcgcgccgattccgtgtttaatgactgtcgggatttcgaatgtatggaatttatgcatgctttctactttcatatttaatgtcatattgtatctcctcctcgttatgcttgaaaccagttcacagccgcaggtttcgtgttgcggtaaatatgtttgatttccgtgtattcttccagaccgattttgccgagttcgcggccgaagcccgattgtttgtacccgccccatggcgcttgcgcgaaatacgggtggaaatcattgatccataccgttcccatccgcagtttggcggctacgcgttcgcatttttcaatatcctttgaccataccgctccggccagcccgtaaatggtatcgttggcaagtctgatcacttcttcttcagaagaaaatgactcaactgttaaaacggggccgaagatctcctcttggactatccgcatatcagacttgcagtttgagaaaatagtaggttcatagaagaaaccgttttgaagggcgggatcatcaggacgtttgccgcctgtttccagttttgccccttcttcgatgccgatttctacgtatttttcgactttggcccgatgctcggcggaaatcagcggaccgctttccgtatcttcatgaaaaccgtttcctaatttgatgcgtttcgtgcgcttgatcagctcggctaaaaattcatcatgaatggcttcgtccaccaaaagacgtgaccctgccgaacaaacttggccggcatggaaaaacacggcgttcagcgcttgatctgcagctgtttcgagatctgcatcttgaaatacgatattcggatttttgccgccaagctccagggcaatctttttcacattgccgcttgccgcctgcatgatttttttgcctgtttcaattccgcccgtaaaagagaccagatcgacgtcgaggtttctcgccagctcgtcgccgacagaggcgcccggccccagcacgagattggcgacccctttcggaataccggcttcttctattaattgaaagactttaatggttgtcagcggagtaatctcgctcggctttaaaacgatcgtgtttccggccgcaagagcgggagcgattttccagctcgcctgaaggagcggatagttccacggcgtaatttgtccgcatacgccaatgggctctctgacgattttacttacggaatcgggaatcggagatgaaatgacctcgcctccgtctttatccgccaaaccggcataatattgaaatacatttgcgatatcatccatatcggctttactttcttcaatcgtttttcctgtatcgagcgattccagctcagctaattcgttcagatcgcgtctgattaattccgcaattttcagaacaaattgtccgcgctcgagcccggaaagcaccggccactccccttcatcaaatgcttttctggctgcggcgatggctttcaccgcatcgttccgatctccttcgcataccgttgcaatttcttcttgattaaatggattaatgatacggcgggtctgttttttttctgcactgatccattcgccgccgatataaagcgttttgctcataagagtcctccttaccgaaaagtaagtttgttaaataaaaatttaatgtttttaacaatattaatttaacatatgtttttttgcctgtcaaaacccggtcagtccgtttagattttgacattttgtcatgattcgttaagattaagaacataaagaaatgacttaacaaatttaaacttcaagaggaaaagagggacagtatggatgagaatccagaattcgcagctatagaacaagccagggaccttgtcattgattccattgcagagacgatggatctttacggaatcacccggagtgtcgggattttatacggaacaatgtatatgagggatgaaatgacgcttgacgaaatgcgtgaggaactgcagatgagcaaaccgagtatgagcacaggcgtcaaaaagctgcaggatttaaatgtggtcaaaaaaacctttcaccgcggcacacggaagcatacgtttgtagcggaaaaagatttctttacgtttttcacgaatttcttcccgccgaaatgggatcgtgaagttcaggtgaatttgtccgccatcgaacaggcccaggcggatttgcagtccgttttgctggccgaggaaggcaacgcggaattacaggaagaagcgcggcagttatatgatcagcttgaaagttcgaaagcttattatcattggctgaagcggctcgccgactcggttcagagcggggagatttttaaatttatcccgatagaaacggacgaaaaaaacgcctgaatcaaaatcaggcgttttttgtcgtgatttgattatttttgagaaaatataggaacataaccccatttacttccattaaaattgatggtaaatttttataggtatggtcgttcttttttaagaacaatcaacaaatttttttttagggggatttatgaaaatgaaacagaaatttttctcaactgtcatggcaagtttattcggcctggttttgcttctttctctgccgacagcgtcattcgccgctgagtcaggctcaaccgttcacgagccggaaatgtccacgaaagcgactgctaccttatttgcaaaatatacaggtgccagccagcaggaatggtcattttctgatatcgaattgacgtaccgtccgaacacgatcctgagcttaggcgttatggaatttacccttcctagcggatttgcggctacaacaaaagatacagtcaacggacacgctttgcgtgaaagacagattctgaataacggcaaaacagtcagacttccgttaaacattgatttgctcggcgcagcggaattcaagctttctcttaataataaaacattgcctgctgcaggtacatataagttccgtgcagaaaataaatcattaagcatcggctctaaattctatgctgaggacacaattgttgttcaaaaacgcagcacaccgccgacacagccttgcaactgcaaataattgcgaaaaacggaccggcacaagcccatcgcttgtcagccggtctttttttgtgctgttttctttcttccggctctcgcattgacaaacccttgaaacaggagtacattcttgtttgttgtatttggagtgacgaaaacagtttcttaaggagttatgaggattgggaaaaatcaaaaataaacaatttgccgtcatcggactcggccgtttcggcggaagcatctgtaaagagctttttaaaatggggcatgaggtgcttgcggtcgatatcagcgaagagcgggtcaacgcatactcctcttatgccacgcatgctgtgcgggcaaattcaacggaagaaagcgagcttcagtcgctcggcatcagaaattttgaatatgtcatcgtagcaatcggcgccaacattcaggcaagcacgctgacgacgctgttattgaaggagctgaacatccccaatatttgggtgaaagcgcaaaactattatcatcacaaagtgcttgaaaagatcggtgctgatcgtattatccatcccgaaaaggatatgggcgtgcggattgcgcaaagcctttcggatgaaaacgtcttaaattatattgatttgtcagatgaatacagcatcgtggagctttcagccacgaaaaagctgcatttaaaatccattcttgagctcggcgtccgggccagattcggctgcaccattctcgccttgaaacataacggagacattcagctgtccccttctccggagactgtcattcatgaatgtgactgccttgtgctgatggggcataaacgtgatattaaaaggtttgaaactgaaggaatgtaaaaaagccggcgggctgccggctttttttgatgcttatgtttcttcacttaactggacggcggtttggtcaacccagccgatcagctcatctttcacttgaatttggtaccagacggattctccgttttgtttttcagatacgactttaatatgctggccggtaaacttttgcgccgatgccagtttaatagaatgccgctcttttgacggcttggaccacacgtcttcaatggcgtggtctttgatggcgcctttcatatcaactgctttaagagaggcattgattttgtcatattcattcagattataggtttctatgacatctttaattttttcagcatagccggggtctgtggcgtagccggatttttgaagggcagccgccgctgttttataattgtccgcttcaatgacggtcttatacttctttttattccaagacgttccgttgacaaataatttggcatggtcatccattgattcaaaaaacgtgctgtatttacggaattttgcccgaatcgtttttcgttttcctttttcaaattcatccgttttcatcgtgacgtgttttcctttataatcaccttttacaccgaacaggttgcgcgctttccccgcaagctcactgttcccccagtccgattcgagaatggcctgtgcgagggtgatgctcggaaggacatgatatttctcatataaaatttgagcatgcccggaaaggctgtcaataaagacctgctgctcgtccacctcttcaggcggtttttcttccgtcactatgaatttcgaaaacaccattgataccagaaataatccgaatataagagatacagcaaaaaggcacccaagcccccttttggtctttgctttctttttcatatcaaccttcctttaattccggaatcactagatttataattttactggtcattgatgaaaatttcaataaaatagggaaaaagacggagaaagaacacattgtgcaaataaaaaagactcccctttgaggagtcttttttgttatgccatgctcagctgagggccgaacaattcatattgaacggaatcagagtcaaacccgagtgcaagaatcatatctttcatttgcgtcataaactgcgctgatccgcacaagtaaaattcagcatcttgattcagatgaagctgctccaagaaggtttgatcaatcctgccgctgtaaaaaggcttgtctcctgagcggtcttgttctgccggttcactgtatacataaatgacgttaatattcggatgattctccgcagcttgttcagcctctttgcggaacgcggcgtactctccgtttttcgcggcatgaataaaagtaacggcacgctccggctgtttttcggcggctgttttcagcatgctcatcatcggcgtgattccggaaccggcactgataagaacaaccggtttttcggcagaagacagcttgaaatccccggcgggtgcgctgacttcaagtttatctccctcttgaacttcattgtggagatgagaagaaaccgctccgtcctttttcacagaaatccgatatgcccctttttgagaagcatcagacaggctgtactggcgaatgtgcgtataaggagaatccgcaatccgcactttaatgctgatatattgtcccgcttcaaatccaggaagcgaagaaccgtcactcggtttgatataaaatgatgtgatatctatgctttctttcgttttctgtataaccgtaaattctttatacccctgccatccggcttcattgtacatgtctttttcaatgccgatgaaagcctccgcaatcacaccgtaagctttttcccatgcctgcataatctcaggagttgcggcatcctgcagcacatccttaattgccagaagcagatactttccgacaatcggataatgttccggttttacaccgatgcttgtgtgtttatggccgatctgtctgaccgccggaatgatttgttctagttgatcaatattcgccgcagccgcaatgactgcatttgccaatgctgcgcgctgagtctgtttcttttggttcgtttggttaaacatatttaacagttcgggatgatcttgaaacatcaggttataaaagcgtccggtgatgttttctccatgtgttttcaatacgggtactgtgcttttgatgatgtctattgttctctcatccagcatgttaatcctcaacccttctaaagatgtattttcaatatatctttatagtaagagatattttgaataaaagatatatttaaaatgaatctttaaaaagtcgtcacaatattgtgttggatttggaatttatggattttacctccttttttatcacccggtgaaacagggacacatatatttgggaatatacgtttaaagatgaaagcgggggagtgcatggtttccgatatcgattacacgtctccgaatacacagttcacttataatgtgaatgagagccgtttttttacgaaagatgctcggaactttatcaatgtattggggattaaacagttaaacacgcttgaaaatatttcattattagatatctttctgagcaaaacaaatgtgattgaaccgcatacccatcaaaatgccgctgaattggtgtactgtatttcgggttccgcggtggtgtcgatgctgaatccgttcacccagaaaatacggaattatccgatttcttcaggacaagtggcgaatgttccgcaggggtggtggcattatgaagtcgccacttcagacagaacccaccttttggccatatttgacgccccttcgcctgaagtgatatacggctcggatattctccgtctgacgccgcctgagatcatggcgcatacgtactgtctgaatgagcatgagtgggaaaaagccgtttccccgatccggcaatcaactgtgataggtcccgataaatactgcggacagactgaaaacacgggtattcatgatatgaataagccttatcagccaaatacgcattatccgaatgatccgtatcggcattatgatacgccgttatattggggatattaaacggagagccagagcggcatcgacagaaagagcccctcattggagaggggctcttgatcattacggtccggttccgcagcttactttgtactcgccttcggacgatttttttgaataacatacgtgcggcgtctgtccggtatcatctttccaattgaaccaatttacataataaaggttcccggcctctccgccgccttcttctttttgaagaatcgcaaagtagctttgatacggatatccttttttataaatgtcatgcctgatggctcctttttctgaagcagacgtgaagacgacgggagaaagagccgggagcgctgttaaaagaagtgccagtgccgctgaaagagttagtagaagatagattttctttttcattttctctctttcctttattttgagttgttagaaatgaagcagaacatagaggctgccgcagaagatgaaaaaacaaaaaaacccttatttatagaataagggtttaaaggtatggagccaagggggctcgaacccctgacctctacgctgccagcgtagcgctctcccagctgagctatggccccgtgctgtaacgtcatgttttattatagacgactcttctatgaatttcaagcagaaaattcagtttgctcatattttcctgagacatttttcgaacataaaaagaagaccctccggggggcctcttcgtttatcgcacgagcatgattaaaatgatgccgaggatgacacggtaaatggcaaacgggacaagcttaatccggttaatgagccgaagaaaaaatttgacgactaagagggcgacgacaaaggcgcagataaagccgacaagaaaaaacggaatcatgtcataagaaagactgctccagtatttcaccagcttcaaaaggcttgcgcccgccataatcggaatagccataataaatgtgaagtctgcggctgcccggtgattcaagccgacaatgacacctccggcaatcgttgagcctgagcgggaaaatccgggccataaggcgagacactggaataatccgacacagaaagcctgtttgtaggtgattctgtccaccgtatcgatcgtttctttccttttattgatccagtccgctataagcataagcacggctccggcaattaatccgtaagcgaccgttctgacggagaataaatagcggtcaatgaaatcctcaaataaaaagccgagcaccgccgccggaacaagaccgacggcgatttgcgcgatggtcagcctgtatcccttctgctgatcgcgcgtgacgttttttttgaggccgagtaaatgtaatatccgatccttaaacacaatggccaccgccagaatcgaaccgagctgaatcaccactttgaaggaattggcggcttccggattcatcaggcttccggatttcagccagatgtcatccgctatgatcatatgtcccgtggaagaaaccggcgcatactccgtcagcccttccacgattcccaaaacggctgctgtgaacatctcccatagtgtcatcccattcttcccttcattcatcatttacaaaagagaagctctcctctgaaggaaagcctgtcttataataaatatcatatccgttccgattttatgacttcgatccagcatcatttttttcttcttcatataaatgcgaacgcattttgaaccaatcaaacagatgggtcgtgaccactttgatgaccgcataccccgggatggctaaaataatgccgacaaccccgaacagctttccggcggttaaaagaacaaagatgatggtaatcgggtgaatgtgaagatttttccccatgatctgcggcgaaattaatttcccttccacgagctggacaacggtccatacaatcgcaagcttcagcagcataaggggcgaagtgaccaacgcgataataatcgccggcgtgatggcaatggtcggccctaaatacggaacaacgctcgtacaagcggcaatgaccgcaagcagtgacgcataatcaagtccgataatcagatagccgataaataataaaaacccgatgcagaagctgacgatgacctgtcctctgatataggaacttaatctgtggttcatttcactaagcatcgtatacgtttgttctttcagacgggtgggcacaaactttaagatataaatcggcagttttttgccgtctttcagcaaatagaacagaataaacggcacggtcacaattgaaataatcacttccgtcagcgcgccgataaaattcccgactccggtaaatgtgctgtttgcaattgtcgccgcctgcgccgatactttattagcaagatcggaaatgttgatattcatcgtcttttgcgcctgatttacaaaatcgcttccgatcaggcttttcgtctgatcttcaacgatatccacatatttcggcagattgtcgatcaggctcatgatctgttcctttaaaaacggaataattgaaacgaccgtaatcgtaatcagccctataataatgaggtaaaggagcaggatggaatagactcttttcactcttattttttccaatatatctacgatcggattaagcagataataaacaattcctgtcaaaatgacggggagcgcaatcgttttgagcaggacgataataggtgtgaaaataaatgatgtcttcataaagacaaggatattgagaccgatgagcagcaatacaagcaaaaacaagacaaatttattgtctaagaaaaactgtttaaatctgccgccccatgtttgcaatgtttccactattgttcctccatcatatgtattttacttaaattgtacactatcgttcctgtaatgaaaaataataaccggtctctatgggaatttttcctatccctttagctggcagccttttttccatttatgtttctcagaaaaaaagctataatgtaagccaatacatagaaggagcgatagcaatgattcgatttgcaacagtcggaacgaattggattacagaacgatttctggaggcggcttctgctattgatgattttcaattaacggcggtttattccagaactgaggaacgcgcggcggaattcgccggcaaacacggcgctgctcattattttaccagcctgaaagaaatggcggaaagcaaagcctatgacgcggtgtatctcgccagcccgaatgcatttcacaaagagcaggcggtcctttttatggaacacggcaagcatgtactgtgcgaaaaaccgtttgcgtctaacgcaagggaaacggatgaaatgattcacgcagccaaaacgaacggcgttctcttgatggaagccatgaaaacaacgttcctgccgaacttcagcatgcttcaaaaccacttacataaaatcggacccgtcaggagattcacggcaagctactgccaatattcatcacgatatgatgcatataagaacggtacggtgctaaacgcgtttaagcctgaattatcgaacggttcgttaatggacatcggcgtgtactgcatttatccggccgtcgtcctgttcggcaaaccgaaaaacgtcattgcgaccggtcataaactagcatccggcgttgacggcgaaggcacggtcattctgtcatacgacggatttgaagcggtgatgatgcattcgaaaatctcaaattcgtttgccccggcggaaattcagggtgaagacggcacgatcgttctggacagcattcacggaccggaacgggcggaaatccgctatcgtgacggccggacggaagacatttcagtccctgatctgaaaccgtcgatgtactacgaaacggctgaattcatcaatcttcttcgaaacggacagcgggagtcttccgaaaatacatttgaacgttctttcattacggcaagcattatggaagaagcgagaaaacaaatcggaattgtctttcccgccgatcaaaactaaaaacatccgcccggattcgggcggatgtttttcatttggatgctaacaggtcagcaaacgcttttgcatactgcggaaggtcgggcgggcggcggcttgatacaatgtgtccgtcagttacgacagcttcatccagccactgtgcccctgcatttgtcatgtcgtctttgatgccgggcgtgctcgttactttttttcctgcgagaattccggcagatatgagcacccagcccgcatggcagatctggccgatcggctttttctgctcgttcatcgtacgaatgatgtccaaaacttcgggatatcttcgcagtttgtcaggtgcccagccgccgggcacgagcacggcatcatactcctgaataatcaggctcttaaaatcgtaatccgccgtcgcaggcacaccgtattttcctttgtatgaacggcccgcttcttctcctattaaatgaacgatcgcgccttcctctctcagccggtagacgggataccaaagctctaagtcttcaaaatcgtcactgacaagcgctatgacttttttgccttctaatctcatcactgccactcccttcttttatactagtgtatcgcttttttaaaatgaggaaaagaaacagctcgctacagctgttcttcgtcttcagactgaatcgtaaatttccgtgtgacctgctgcagttcttcagccatatgcgcaagcgtttcggcggatgaactgatttcttccatggaggccagctgctcttcagctgaggcggcgatgtcttgaatgccggcggacccttctttggcgactgaggtaatgtcctccaccgcgtttgtcacattttgcgacccggctgcaagcttctcaagcgttccgttcatatgctgcaaggcgcctgaaatctgagtcgtcatttctgagatttttttgaagctttcggccgtttgatccgtaatatcgaggccttccttcacatcttgattcaccgcttggaatacggaaagcgatgtggcgatttctttgacgatttcctgaatcagcgtttcgatttccttcgcggagccggctgattgtacggcaagctttctcacttcttccgcaacgacggagaagccccgcccgtattcgccggctctggccgcttcaatggcagcgtttaaggcaagcagatttgtttgatcggcaatgccgttaatgacgttgagaatgctcttaatgtcgtgcgacttcgtttccagcccttttacgaccgcttccgcctgctgtacggaacgatcaattgttttcatctggccgaccgttttcgccactaattcttctccgctcccggccgtttcagaggtttggatggcggattcagtgatttccgccgatacattcgccgtctcggcaatgcccgcattcatttgggaaaggtgatcagcactttcttccaatttctcgctttgtgattcgtttccgtttgagaattgttcaatcgccagtgtaatatgctctgtcgccttgcttgtctgtccggcggatgccgtcagctcttcggatgaagaagcgacatgttcgacggatgactggatgacgccgatgacagaccggagtgacgccgacatctcattgaagctttggctgagctgcccgaattcattttttgacttgatgtcaatgacttccgttaaatcgccgtcactgattttagctgatgtcgaaacaagttttttgagcggttttgcaatcgagcgaatgataaaaacgattaaaataccgccgacgataagagaaaccgccaggatgatcagcgccattttcatgacaggcgaggctgcgtcatggatctcactgacaaaaaatgtgccggcgattttccagcccgtcagtttgtttgtcgtgaaggccattttcttctgctgtccttcaaacatgtattcaaacgatccgcttgatttggaaaatacttcttccgtccactctccggagccttccgttcccgcttttatagtcggatgcgcgatgtattttttatctcccgttgtaatgaaggcaaaacctttatgaccgatctggacgcgttgggaggcattcagcaggtcgcccagattaatatcaagcgccacaacgcctgatccgtcttttgtctgctgggcaatcgtaacgaccgtctgtccggttgcagcgtctttataaggctcggtaaacactggctgtccgcttttttcaaccgcttttgtataccactcgcgcgtgagcggattataatcggacggcatgtcaacggacggatatttcacgaacgctttgtcgcgagacgcggcgtaaattgacgcgacatcgtcatttacggtgacatactgcttcattttgtcaagcagtaccgattgatttttcgtctccagtttttcctttgtgattgattcgctgtagtagtcaatcgctttcagcttaccctcaagcatgttttccagcacgctgttcagttcgctgacatttccctgggcgctgtgggtcagttcgctttctagtgaattccccgccgtttggtagctgaagtaggcgagtatgccgaccggaagcaccaatacggctaaaaatgccgcgatcagcggtttgctgatggatggctgtttgatccaatgtatcagttgtttcattttttcagtctccttctttgaaaagctaaatctaatatcgtcagataggacaaaagatttattaaaaaaactaaaaaaaacacccaaacagcacatttgggtgttctatgacctattaatctattttaaatcgtttcgtcatatcacgtaattcttccgccatttgggataacgtttccgaagacgaactgatttcttccattgaagccagttgttcttcggcggaggccgcaatatcctgaatgctggcggagctttcttttgcgatggacgcgatttgctcagaagctcctgaaatctgctgagatcctgctgtcagctgttctaccgtcgcattcatattttgaatttctccggcgatctggttcgtcatttcagaaatccgtttgaagctcgtttcggtctgattcgtaatatccagtccgctctccacctctttgttgacggattggaacatgccgagagatgtattgatttcgttgacgatttctataattaagctttcgatttctttcgctgaatcggcagactggaccgcaagttttctgacctcttcggcgacgactgagaagccccggccgtattcacccgcacgcgcggcttcaatggccgcgttcagcgcaagaaggtttgtctgatcagcgattccgttaatgacacggagaatgtttgtaatgtcttttgattttgtttcaagtccgcgcaccacttgttcagcttctttcactgaccggtcaatgacgttcatttggccgaccgtctggtggacgagctttccgcctgaattggcgacttccgctgatgtggcagaggattcggtaatgacggcagatgctttcgccatatctttaagcccgctgttcatttggtaaatatgttccgccgcgctttcaatattttcactttggctttcatttccgttagaaaattgttcgatcgccagtgtgatatgttcggttgccttgcttgtctgctccgctgaagccgtcagctcctctgaggaagatgcgacgttattcacggaatcctggatggcatggatgagagacctgagcgaagcggccatattgttaaagcttttgccaagctcgcctaattcatcttttgagtgaatctcgatcgtttctgttaagtcgccttcactgatctgtttcgatgatgtcacaagctgcttgagcggttttgtgattgaacggataatcagcaccatgacgatggttccgatcacaatcgctaatacgagaacgagcagggacagatgaaggatcggcagggccgcttcatgaatttcgtccagatacatcgttccggtaatcttccagcctgtcagcccgtttgtatcataagccattttcttttcctggccgtcgtatttgtattgaaaatcaccttttttgctggtgaacagctgttcagcccactccccgtttaatactgtgcctgacgtgcggttcgggtgggcgaccacttttttgtctttcgtcaggataaaagcgtagccggatttcccgatgttcactttctttgtcgttttcagaagctcatcgattttcatattgatggcgacgactcctgagccgtcttttgtctgctgaacgaccgtcacgaccatcgtattggtggaagccgtgcggtaaggatctgttacaacaaccttccccttattttccacggcctttttataccagtctctttcaagcggattatatcctttaggcatctgcagatccggataccgtgtgaaatgtccttccgtgtcactcgtataaatggattccacgtctttattgatcttcatgtactctgtgaatttatcggtaatttgcgattggtttttcggcttgtaccgatcctttgtgagccaatcgctgaaatatgccgttccgtcttccttttggctgatgcttgtgttgatcatatcgttaatctgctgcacattatctagtgcgcttcccatcatctgcctgtcaagcgtgcttactgccgattgataggcgataaaagccagcgttgaaataggaagaatgagaatggccaaaaaagaaatgagcagttttcttgtaagcgatctctgcttgatgatttgcacaatttttttcatctgctatatctcctcttgcgtgtttacccttcatatcggcaattatgggtaaatatacacatccaaaaagaagaaatataacgaaacatactttttacctatcttaaaattagtcttttagacttaattaagagtttatcttaaaacgctttgtcagttcgcgtaattcttccgccattttttccagcgtgacggcggaggaactgatttcctccatggacgcaagctgctcttcagctgaagccgcgatgtcctgaatgccggccgcgctttgtctggagacggccgcgatatcctctgaagcgtttgatacttcctgagacccggcagaaagctgttccacggttgcattcatattttgcagttcaccggcaatctgatttgttttaacggaaatgtcccggaagcttttttccgtttcgtccgttaactgaagtccgcttttcacctcgtgattgacggattccagcattccgagcgaagtatgaatttctttgacgatttcatgaattaaggattcgatttctttcgctgaatcggcggattggacggcaagctttctcacttcttcggcaacgactgaaaaaccgcgtccgtattctcccgctcttgccgcttcaatggctgcatttaaagcaaggagattcgtttgatcagcaatgccgttaatgacgcgcaaaatgctggtgatgtcctgcgatttgagttcaagcccttgtacgacttgctccgctttacttacggattggtcaatggcgcccatctggccggctgttttcttgacaagccgctcaccggcatcggatatctccgccgattcaattgacgtttccgtcaccacggctgccgcttccgccagatcactgagcccgtctttcatctcattcacttgggctgtcgctttatcaatactctcactttggtcttccgttccattagaaaactgttcaatcgcaagggtgatatgttccgttgctttgctcgtctgctcagccgaagccgtcagctcctctgaggaagaagcgacatgttcaacagagtcctgaattccctgaataagcgaacggagtgaatctgtcatatgattaaaacttttaccgagcacgcccagctcatctttagagctgacatcaatggtttccgtcagatctccgctgcttattttttccgctgatgctacgagacgttttaacggtttggtaattgagcggatgacaaaataaatgaaaatcatccctgcggcaatggctatcgccaatatgataacggccagagtcagaaccggtcttgccgcatccttgatttcttccacggacatggttccgctgatcttccagcccgtcgcttcattggtcacgtacgccatttttttcgctttcccgttcagcgtatattcaaagtcgcctttttgcccgctgaataatgtatcaacccattttcccgataccgccgcgccggctttttcatcactgtaggcaacggcttttttatttttgctgaggataaaggcgtatccttcttttccgatgttcacttcttttgtcatcgtgatgagatcgtcgatttttatatcaatggcgacgacgcctgatccgtcttgcgccgcgcgggccatggtgacgaccatctttttgtttgagatggactcataagggtctgtgatgatggtttggcctttattctccatagcttcctgataccagcttctttcaagcggattgaaatcggccggcatatcggcatgcggataacgggtaaacgttccttccttgctgcttgaaaatacggcggatgctttatcattgctttcaataaactgtttgaacctttcttgcatttccgtttggtttttttctttaaatttagcgcttgtcgcccattcgctgaaatatgctgagctttttgtaaacattccgatccggtcatcaatcatattgtttaagatttgcacatttccttcggcgctttccatcatttgcttttcaacggatgaagccgccgaacggtaggcgccggcagccaatactgctaccggaatgattaagatcagtaaaaatgaaatgatcagttttttggctattgattttctggcgattttttttgctgtttttttcaattttgtaaacctctttcaatcatttactgtttatatcggccgactccctttttattacattgaaaattaagtcataaacgaaaaatagttctatgtactccctttgtatgcaagactttttatttaattatccggctgtcactataaaaaaggacgccttccatccggaaagcgtccttttttactagttgattttaaattgtttcgttaattcccgcagttcttcggccatttgcgccaaagtatcggcggatgtgctgatttcttccattgatgcaagctgttcttctgcggatgcggcaatatcctgaatgcttgctgcgctttccctagatacgtccgcaatatccgtcactgcggctgaaacgtgctgagagctgtctgacagctgttcaaccgtgccgttcatcgattgaagcttctcggcgatatcgtttgtcatgccgaagatattctggaagctttctttcgtgcggtccgtcacggcaagtcctgattgaacttcttcattaacggatgtaaacatgtgaagtgatgtattaatctcggccgtgatttcctgaatgagtttttcaatctctttggcagaaccggcggattggacggcaagcttgcgcacttcttcggctaccactgagaagccccgcccgtattcaccggctcttgccgcttcaatggctgcatttaaagcaagcaggtttgtctgatcggcaataccgttgatgactcttaaaatatgagtgatgtcttttgatttggcttcaaggccttttacaaccgcttccgcctgctggaccgattgattgatgagattcatctgcccgacggtttgctgcacatattcttccccggtgccggcagcttccttcgattgtttagatgcttccgtaatggatgatgatgtgcgggaaacggcggtgagtccgtcatttatatgattcagcttggctgagcttgaatcgactttttcgctttgctcttcgtttccgtttgaaaactgctcaatggccattgtaatatgttccgtcgctttgcttgtctgcgaagctgaagcggtcagctcttccgatgacgcggccacattgtcgacagagttttggatcgcgctgatcagtccgcgcagagattctcccatttcattaaagctcgcgccgagttcgcccaattcatctttcgagcggatatcaatggtttcagtcaagtctccgccgctgatttgtttagaagagcggacaagccgtttcagcggtgacgtaatggatctgacaatcaacagaattaaaattcccccgatgataatggatgctgcaaggacgatcattcccatcgtcagcaccggttgtgaggcgtctttaatttcgttgagctccatgctcccttctattttccatccggtcagtttatttgtcgtaaacgccatttttttattttgatcatcgagcgtgtatgaaataatgccgctgtctttgctgtatacttcattcagccacggggttgaaactttatcgcccggtttgtggtctttatgcgcgacataggttttatttttggacgtgataaacacgaatcctttttgcccgattttgattccctgcatctgcttcagcagctggtcaatcgtaatatccatggccactacgcctgttccgtcctgcatctgctttgccacggtaacgaccatgctgccgtcgcttgccgcggtgtaagggtcggtgacaacgagcgtgccgccggccttcacagcgtctttataccaagtgcgtgttctcggatcgtaatcggccggagtattctccttcggcgcctgtgcgtagctgccgtcttccgttcctccgtaaatgcgggctacgtccttatgaatagacgtgtattgcccgaacttttcttcaagagcagacatgtttttctttgagaaggatgacccttttaacgtttcactgaaaaattcaatcgcctttgcttttgagccgatatcatttgtaatcgttgtgttaaaagattcgatgttatttttcgcgttgcctgaaatctgatcatccagcgaattgctcgccgtatggtatgaactgaattctaacacgagaatcggtatgattaagatcacgataaatgaaatgattaatttacgtgaaatcgatgcctttgtgcaccaattgatgaattttttcatattaagctgctccctcaagtgtgataccttatatatcggctcagtcttcacattttgttaacatttcctccttttttatgtcttgattttcattgcccaagcttcctgcatatcttataaaaaaagagaaggggggcgcgcagatgattatcatatccggccaagtgcttcgtcctcaggacatcgcgaactggcagacggaagaaagccttgttccgtatataaatgaactgctcaattctcccgtacaattcgattacgggtcgattgctgaactgatgttcgaggtgcggctgcgccgccatattgtggaagccgcaagagaactgcacggatcaggtgtgaaatttgcaactttcgccaaaacatacggaaatacggcttattggagagtgacgccggaaggagccttggagctgaagtacagaatccccgcttcaaaagcgattcgggacattattgaaaatggggcgttttacgcatttgaatgcgctaccgccattgttgtgatttattatctggccgtcttaaagacaatcggtgaagaacggtttaaccggcgtttccgggatatcactttgtatgactggcactatgagcatctgccgatctacacggaaaccggcagccactttttacggggagattgtttatattttaaaaatcctgattttaatcctgcaaaggctcagtggcggggagagaatgtcattgtgatggggaatgatcaatatttcgcccacggtctcgggattctgaccgctgaacaaatcatccagagattgaattctttaagaaaaaaaaatgccgtgcagccggcttatctgcttaaccaggcaacaaggcttgatgcacccgcgctttaccagatcatgcattaaaacaatcccatcgtctgtcattgtgacgatgggatgcggaatgcttttcttttccggtaaaaagccgtcgtgccgagcgcttgatttgcagcccattcaaacttctctaaatcatggcgggtgacggctctgtcccgtcggctccatttaatggcgcggacaaagtaataccctttaatcggcgccatggtgactttggaatgcggaaaatcttcaaagacaaactcaatagtccctctttttttgtaggacatttgaagaatcttcatcatccatcacctcacgatttctgaattatgattcgcacaatctgtccaaaacggttttcacgtctgtcggcccttcaagtttcgcggcggactggccggcccataaagacatatactccgcgtctcctgattgagccgcgtgcccgcgcatcggctttgtcagcgtattatgcagcggataaggcagcgtatttccctcgtcagcctcatatgttttcatgaactgattcacgattccccgcgcctgttttcccgaaaacagggtggtcagccgcgtgtcggctccttttgattcggcaatggctttttgatatgccggtgaggcgctgctttcttcgcaaagaagaaacggtgttcctacttgaacgccgtccgcacccaaacagcgggcggcctgcacgccgcggcggtcaaaaatgccgcctgccgcaatcaccgggatattcagcgcgtctttagcctgcggaatcagcgccataaggccgagagccggttctcctttaaccggcagaaacgacccgcgatgcccgccggcttctattccctgaagaataacggcgtccatcccccgttcttcaaagaccttcgcttcctccggcgttgtcgccgtgccgaaaaggaaacatccgcttttcttcagcttttccgccgtttcttccggcggcaggccgaaggtgaatgaacacgctttgactccgtaacggatcagaagctccgctttttcctcgaaatcattccattcttctttcagatcagagaacggcttggcgtcttttgccctcgggatgcgggctttccatttttcaacaagttccgcctcaggcatctgcctttcttccggaacgaaaagatttacttgataggagcggttcgtcagctctttcatctcgataagctgtttttcaagcgcttgcgggctgacgtatcctgaagcgaggcttccgagcgccccttcatttgataccgccgaagccagacgcggcgtgaccagcccgccggccatcggcgcctgaatgacgggctttgttaatgataatgcactcatccactcactcatttgtgttttcctccgtttcagcctgtattttgatataacaggttctgtttcgcggaccgtcaaattcgcaaaaataaacgccctgccatgttccgagtatcaggcggccgtcttctatgatgacatgctgggaggcgcctgttgtactcgctttcatatgtgccgccgtatttccctccatatgccggtccagttcgtgctcccacggatacatttcatcaaaccttctgagcatatccctcttcacatccggatcggcattttcatttatggtaatgccggcggttgtatggggacagtatatgagcgccaaaccgttttttacgcctgttttgcggagaaacgcttcggcttcatgtgtgatgtcgatcatttcagcccgtctgtttgtttgaatctgcaattttttcagcatatgaatgcctcctttctttttctcttcctttcccatattcgtttctgtatttgtcttttcctgtcggatcgcgatgataaacgcagatcacaaaaaacttcagcctcgggactgaagtttttcaccatatatatacgcgggcctcataaggctttaaaagaaaggatgtcacatgccgatgcggtggtgtttccatgcttgcgagcacgagcgtatcggagtcaagcggataaccgggatgcttgtataaagcgggggttcgggacagatttgtgatgatcagggcggtttttgttccgttttttcttagataggcataaatctgccggtcattcggaagcagcaattcatatgtgccgctgatcaatacgctgtgttcttttctgagggcgagcagccgtctgtagaaatggtatacggatgtttcatcctgcatttgtgatgcagcattcagccatgtgtggttcggattcactccgagccacggagaagcatcagaaaacccgccgttcgcctcatcgctccattgcatcggtgtccgtgaattatcccggcccttcttccagatgatcttcatcactttttcatgcggaacgccgcgggacgtctctttttcatacagatatttcattgcggcgtcatcataatcttcaatggatggaaacgaaacattggtcatcccgagctcctgcccctggtaaataaacggcgtgcctttcatcagcatatacatcgcggcgagtgccttggcgctttctgtcaaaaaccgttcgtgaccccataccgagacggaacggggctgatcgtggttctccataaataacgcgttccagccctttccttcaagactgttctgccagccggacaagacgcgtttaagcgccggaatggagatgctttgatcatcttccgtatcccagaggccgagatgttcaaattgaaaaatcatttgaaagacgccgtgttcttcaccggcccaatcagccgcctcccaagccgccactccgttcgcctcgccgaccgtcatgatcggatagcgcgaaaatgtttcccgtttcagctctcttaagagatccattatgccttccccattcatatgatacgggaaagacgggacgtacgggagaccgtccggattcggcatgtcagggagcccttcttttttcttaatgtgagaaatggcatccaccctgaagccgtctatgcctttatcaagccaccagcggaccatctcataaacggactgcctcatcgcttcgttttcccaatttaaatcaggctgttttttgtcaaacaggtgcaggtaatactggccggtctcttgatcatattcccacgctgatccgccgaaaatgctttcccaattgttcggctctttgccgttttttccgtctctccagatgtaccagtcccgtttttcggaatctttcgctgagcgtgattcgataaaccaagggtgctcatcgcttgtatggttgatgacgaggtctataatcagcttcatgccgagcgcatggacatccgcaaggagccggtcaaaatcctccatcgtcccgaattcgccggcaatttgtttataattccgaatatcgtagccgttgtccgcgcccggcgagtcaaaaacgggacaaagccagatcacatccgcccccaactcttttatgtaatgaagctttgctctgatgccgttcatgtcgccgattccgtccccgttcgaatccataaagcttcggggataaatttgatagacggccgccgttttccaccaatccgttttcataccgacactcctttctttacattatatgaaggagcgggacgaagaagcattttttccataaaaaaagcctcattgcaaaagcaggaggctcagaaatcagtttttttaatttcaacgaagcggatatgatggtcttccgcttccagcaccttaaattcacacccttcggcatgaaacacatcaccatttttcagctccattttttgtgttaagagccagccggcaatcgtgtcaatgtcttcattttcgatggcgataccaaggagatcattcacctcttctatgagcgccttgccgtccatcacatagtggtgttcgccttttttgacgatgtggggcatttcatcctggtcatattcatcacggatttccccgacgatttcctccaatatgtcttcgacggtcacaagtcccgccgtgccgccgtattcgtcaacgagaatcgccatatgaatccgctccttctgcatgcggatcaaaagctcctgaacggggatgctttcaatgactctgatgaccggacgcataatttcttttaattcaatggagcggccgagaaaatacgctttaaataaatccttattgttaataatgccgagaatgtgatctttgtcttccttaataaccggatatcgcgtataccgttcgttgatgatcaaatgtatggcttcatcaactgactgttcaagcgagatggcggcgatttcggtgcgcggcaccatgatttctctggcgacccggttatcgaattcaaatattttattgacgtaacggaattcagattgattgatttgaccttttttatagctttcggacaaaatcagccgcaattcctcttcactgaccacgacctcatgttctttcaccgaatgaaaaccgaacagcttgaccaaaaatccggctgagccgtttaacagcttaataaacggatacatcactttataaaacagaatgagcggtttcgccgtccacagactgacggcttcggctttttgaatggatatcgttttcggcgcaagctctccgatgacgacgtgcagatacgtgacggcgataaacgccgcaataaacgtgacgacgtgcgtaatggatgacggcattccgatcaggctgaaaacaggatgaagaagccgctgaatcgtcggttcaccgagccagccgagtccgagcgccgtaatcgtaatgccgagctggcacgctgataaatattcatcgagatttgaaatcaccctgtgcgccgcgagcgcccggctgtctccggtttcaaccagctccgcgatttttgaaccgcggattttgacaatcgcaaattccgcagcgacaaagatggccgttaatccgattaacagcataatgagaatcagttttaatataagcaaaaaaacccctaccgcaaacggtaaggggccacctccttcgtgttaattctcatcacgaccatttaagaaaatcatcacaaaacgaagcagctcgaataatgaaacgagcgccgcagccacatacgtcagcgcggcggcgttcagcactttattcacgccgtgttcttcactgttgcgaatgaatccttccgacacgataatccgcttcgccctcgcgctggcattaaactcgacaggcagtgtgacaagctggaaaaaaacagcggccgaaaacaaaataatgccgagtccgattaagttcaagctgcccaggagcatcccgcccaagaaaagcagaggggcgaccccggaggcaaaattgacgaccggaaaaattttgtgcctcagcacaagcgcgccgtatgattcctgatgctgcaaagcatgtccgacttcatgggaagcgacggaaatggcggaaatggagcggccgtaatataccggctcagataaacgcaccacccgctccgtcgggtcgtaatggtctgttaaagtgcctcttaccggttctaccggcacatcatataaaccgttaatatcaagaatccgtcttgccgtttccgcccccgtccgctgactggaagcttctacgtctgagtatttctgaaaattgcttttcactttaaattgtgcccaaaacgacaatcccaatgcagcaattgttaaaaagataaacagcatattatcctcttcctttttctcttatatcgtacgatctgcttatatattattttaatgattgtccgctttcctgtacagaaatccgcttcttttttctgacaggaatcaatcctccgagcatgatgaggatacacccggccaatccgatgtaaaacggaaacgtgcctgcggtctcttttgcaaaaacaagccatgaaaatccgccggacatatgattgtatccattcaaatcgaaaataagcaatacggccgccgaagcgagcagctgcgctccggccagcgccgccagcagtttttgaatgactgtcatttgactcaccctttttcggtccgctttctttatcatatgaaaaaatgagggtgaatatgttttcggcgatttttgaaagacatcaaacgaactgggacatactgtataaaaaaagatacaggtgtgatcgacatgaaagtgacaaatggcgagaaagaacagctgagcaatgcgatagacagaatgaacgaggggcttgacgcctttatccagctctataatgaggcggaaaacgacgaacctctcatacagtttgaagatgagacggccgatttaatcagacatgcgcgtaactcatacggccaggaacagctggacgaaaaactaaacaccattattaagcagattttatccatctctctgacgaaagaagagccggacgaatgaaatcaaaccgtatttttatttcctggctgagatggccgttatatgttcggatcggactgatcattatcgctttgattttattgttcggccaactcatttacatgcttgagccgaagcaattcacgtctgtgtttgaaggggtttggtgggcggttattacggtggccacagtcggctacggcgattacgttccccagacaccgctcgggcagattgccggcatggtgcttgtattaagcggagcgagttttgtgaccgcctatttcgccacgctttcttcagccgtgttcagcaaacagcaccgctatgtcgaagggaaggtcgcctttaaaggcaaggggcacgtcattcttatcggatggaatgagaagtcgcatatgctgctgaaagaactgcagcacatcgcgccgtcaaaaactgtcgtcctgattgatgattcattaagggaagggccgcttattgaaaacgtccatttcatccgcggacatgccgctgatgacagtacgctcaataaggcgaatattacggaagccgataccgtcattttgacagcagaccagcagaaaaatgaatccgaagctgatatgctgtcggtattaacgcttctcgccatcaaagggctgcatccgtccgtttattgtatcgtggaaattttaacggaacggtatgtcaaaaacgccgagcgcgcaggagccaataagattctgtgcacatcacgcctgtcgagccgggtgatgtttgagcattaccgggtcaagctgcagcttgccaaaccgcaaacgctgtcagatctgacgctggagaaaaaggtgcgcatcattcccgtccccgaggaattaaagggctcatcttatcatgactgtgcgctctattatctcaaacggaataccacgatcatcggcatacaaaaagaagaggggccgatgctgacccctcccctgtcataccaggtgctcgatactgatctgtttttggctctttaatgcagcaggacgtcttccagctctttcacaagcgagatgccgatatctgtatatgagcggtcaattgccgcatcccgccgtttcggctcggagaattggttgaataatgactcaaaaacaccgccgcctgcgtgatcatccgtttcctcctgatagacgtgcctcagcaaaaagggtgtgccgattgtaacggaggccccccgttcatccaggtgtcccttatttgcttcaacagggatacggagaaataaatagccgtcctgatcggaaattttgtaatcaaagaacccgcggtcatactcccagccgcctccgatggtataaccgatcggtttcagcacctgttccagttcgcggagtaaaaacgattgcccctcaagtgaagatggtatgctgatcatgtgcatatgctcctttttgtctttagcgtccccgctctgcggcatcttcatacggcgcccgggaagaatcgggagcggcagacagacgccggaaagaggtaacggcgcattcaatcagaacatacgtcacaattgcggagagaacggcttccgttgaaatatagaaaacggcggcatagagacagcacttcgtgatcagcgactgcatccggccaatcttcagtttcagccggaccatgtccgtaaacaagccgagagggaaagcgaaaaacaggatggtttgtaagagggattcaggagacagttttagtgccgaatagacaatagcggcggaacagacggaaatgacggcatgcttacataagagccgtatcattcatcatcacacctttcacggtttaaaaaaggctgacccgtcatgctgagggccagcccttctttttatttttcaaggcgtttttcaagctctgcttttttctcttcaaagcccggtttgccgagaagcgcgaacatattcaccttataggcttcaacacccggctgatcaaacgggttgactccgagcagataaccgctcatcgccaccgctttttcaaagaaatagacgagatatccaaatgtatatgcattaagctctgaaatattgacaattaagttcggcacttttccgtctgtatgggcaagcatcgtgccttcgaacgcttttttgttgacgaaatcgaccgttttgccggctaagtaatttaagccgtcgagatcattttccgcttcttcaattgtcagctcatgcttcggtttttcaacgtttaatacagtttcaaacagatcgcgtctgccttcctgcacgtattgaccgagagagtgaaggtctgttgagaagttagcggaagaaggatagatgcctttttcatcttttccttcactttcgccgaagagctgcttccaccattccgcaaagtattgcagcgcaggctcatagttgataagcatttcaatggttctgcctttattatacagaacgttgcggacgacggcgtattggtaagccgcgttctcttctaattccgagctggaaaagtctttgcttgcatcaagagcgcctttcatcatttcatcgatatcagccccgcttaccgcaatcggcagaaggcctaccgcagtcagaacggagaaacgtccgccgacatcatcaggaataacgaatgattcgaagccttcttcattagaaagcgtttttaaagcgccgcgctctttatctgtcgtcgcgtaaatccgcgctttcgcttcttcttttccgtatttttcttcaagaagtttgcggaaaatccggaaagcgattgcaggttccgtcgtcgtgcctgatttagaaatgacattgatagagaaatcagcgtcttccaaaagatccataacatctttcatataagttgagctgatattgttgccgataaagataacttgagggtttttgcgcttgtctttcggcagaacgttatagaaagaatgattgagcgcttcaatcgccgcgcgggcgcctaagtatgaaccgccgatacccacgacgagaagcacgtctgaatctgatttgattttttcagcgctttttttaatgcgcgcgaattcttctttatcgtagttttcagggaggtccacccatcctaaaaagtcgcttccggcgcctgttttttcatggatattatggtgtgccgtttttacgaaatcacgtgcgtatgtaagttcatgttcattgaaaaaaggtaacgctcttgagtaatcaaagcgtacatgcgtcatttgcttgtccctccatcacggtgaattgttttctctttcactttatatgaactcacccgctaaatcaagtcatgaagaaggcatgatgaatacgggatttgcgctaaagatgcgttcattttttatacaatatcccggattcgagatggttatatttgtattaactgtgagagggataacgaatcgaatgttggtgatccaggaacgtatcacctttactttggagcaggatgacatccatcgccaatcccgatgggccggttctttttatatagtactcctcttgagagactgccacgaaggcatattaagacataaatgtacaattttaaaaatagtgtctatatttggggtatcgtgttaagatgaaagtgattttaaaccgggaggtgattttatgactaaaaccattggtcttatttgtggaagttcacgaaaaaactcgtataattgagcaattgctcaatcattgattgacttcgataatgcggctcaatttcgttgggttgaaatagacagtcttcctttttttaacgaagatttagaaattgccggagcaccagactccgtaacatcctttagagctgatatacaagacgttgacggcgtcatcattgtaagtccagagtacaattccggaattccgggggtattaaaaaatgcattggactgggcatcgagaccgcggacctcttctgttttaaacagaaaaccggttggcttaatcggagcaacccccggagggttcggtactgcctttggtcaaacgcaaatgagggaagtactcgaagctatgcaagtcaatgttttgccctttcaaaaaatgctggtttcgcaagtccatgagaaaattgattccgctcaaaacatacttacggatgaacaaacaaaacgttatcttcaacgctatttacaacagtttatccattggattgatcatgctccggttcccgttccagattaattgaaggatcatccccctcacgaaaagtcacctcagaaataactttctttctatacagcatatgaatagatttaccgttttcaattcacaaacttacttgccttaattcaaggaggatgataaaatgtctgatctttattcccgtctttcaaaagatgatgctgccgtgcttttagttgaccatcaaaccggccttatttccggtctcgtgcgtgactatggcgttgatgaatttaaaaacaatgtactggctctcggtgatacggctaaattctttgatttaccggttattttaacaacgagttttgaaaacggacccaacggaccgctcatgcaagaactcgttgatctctttcccgctgcgccaaaaatagcccgtcccggacaaattaatgcatgggacaatgaagactttgttaaagccattgaggcgactggcaaaaaacagctgattatcgcgggggtggtaacagacgtctgcgttgcttttcctgcgctttctgccattaaagcaggctacgaagtgtttgttgtgacagatgcttcggggacgtttaataagcaagtagcagatgcatcattaacgcgtatggctcatggcggcgcgcagcttatgaactggttcagcgtagcatgcgagttacaacgtgattggcgcaacgacgttgaaggttttggcgcattaatctccagtcatcttcccggttatcaaaacttaatgggaagctatatgggggcgcagcgggaccttagtacacaaaatgcataaaaggagcgctgattgaatcagcgccccttttttaaattcgaagtatagcaaggctcttcatcttcatgatttagattttgtgtaaatagatgatcggcaatcgcaaagttaattgatccttttctgctaaatgtacagaaacagggagtcaaatccgcatcatgtgagatttccatagttgtctcatggcaaggggtgtttcacttgctcttgatgcactaatgaagggactcccaaaacggttgcatctgctgcttgaaaatctatttcatcttcaccccggccgggaatgtatcttacagtgacgcctttaagatggcaagtacatcatctttgttcagtttttggaaattgccgaatccgccgtattccatttcttttgcggcgatgtctgcgatcagctcaagcttgtcttcaccgatgtcataatccgcaaggcgggacggtgcgccgaggcttgtccagaacgcggacaatttatcgatcccttcaagcgcaatttctttatccgttttaccttcagtatcaatgtcaaacatgttgagcatcaggtttttaaaacggtctacatttgtatccagcgtgtatctcatccagttcgggaacagaatcgcaagtcctcccgcgtgagggatgtcataaaccgctgatacggcgtgctccatcgtatgggaagcccaatcgccgaaatagcccatttgcagcgtgccgtttaatgcgatcgtacccgcgtataaaatcgtttcacggtgcttatagttctcaaggtcttccaaaagtttcggcgctgtttcaattaccgtctgaaggaccgcaaaacacattctgtcctgaagcggcgtgttttcaacattgtggaagtattgttcaaatacgtggctcatcatatccaccatgccgtatacggtttggttttccggaacgctgaaagtattctcaggatctaaaatggagaaacgcggatgagtgacattgctgccccatacgaatttttcgtttgtttcccaatttgtgataacggaatcagggttcatttcagagcctgtcgccgcaagcgtcagcaccgtgccgaacgggagcgcgtcctgcgccgttacttttttgctgtaaatgtcccatgcgtcgccgtcatatttcgcaccggccgcaatcgcttttgtacagtcgatgacacttccgccgccgactgcgagaaggaaatcaatctcatgctttctgcacagctcaattcctttatttaccgtttccagacgcgggttcggttcaacgcccgcaagctcatgaacggttgcgccttcttcttttaagatgcctgttacttggtcatacaggccgtttcgcttaatgctgccgcctccgtaaacaagcagcacgtttttcccgtattgcttcagctcttttttcaattggtcgatttgaccttttccgaaaatcagtttcgtcggattgtagtacgtaaagttctccatttatcataacctccaaaaaaatcgtaagggaattactataacacagaaaaaaaggagctgccaatccagccgccccctttatgttattacaatgatgctttcagtatcgcaagcacgtcttctttctgcagtgacttgaactgtccaaatgctccgtttgccatcgctttatctgcaatcgtatccagcttctcatcagaaatatcataatcagcgagtctgttcggagcaccgaggctcgtccagaaatcagacagcctgctgattccttcaagtgcgatctcttcatctgatttgcctgtctcgtcaatatcgaagacacggacggcaagctgtttaaagcgggccggattttctttgagcacatgtctcatccagttcgggaacagaatcgctaaacctccggcgtgcggtatatcgtaaaccgctgataccgcatgctcgatgttgtgtgtggcccaatcccctcttgcgcccattgacagcattccgtttaatgcgatcgtgcctgtatataaaatcgtctcacgaagctcgtagttctccagatcattgatcagcttcggcgctgtttcaatcaccgtgcgcagaagcgattcacacatccggtcctgatacggcgtgtttggcgtgtggtggaaatattgttcaaacacatggctcatcatatcgaccatgccgtaaatggtgtggtctttcggaacggtaaatgtgtttaccggatcgagaatagagaatttagggtaaacgagcgggctcccccatccgtatttctcttgtgtctcccagtttgtgatgactgatccggagttcatctctgaaccggttgccgcaagtgtcagcactgttccgaaaggcagcgcttctttcggctggtgtttttttgtgacgatatcccacgcgtcgccgtcatatttagcgcccgccgcgatggctttcgtgcagtcaatgacacttccgccgccaacggccaataagaaatcgatgctgttttctttacagagcgcaacacctttgttcaccgttgagacacgcggattcggctctacgcctgccaattcatgtacggtaacttccgcttttttcagcagttcggttacttgatcataaagaccgctgcgcttaatgctgcctcctccgtatacgagcagcacgttttttccgtacggtttgatttcttcaggaagtttttcaacctctccctttccgaaaatcaatttggtcggattccaatatgtaaagttttgcatgacatctcctcctttggatttatattatgcagaaagatgacgttcaatgtaaagcaatccgcttttttgacggcgcatcacatggtttacagacatcgaattcccgggaaaggcacttgtacagcttgaaacagtgtgtgattttcacggcggagaatgtagtatgcatagattctttgctttgtcacaatctataactgtttcacgaattcatagaggaggttgtttacatgagtgttattcagcgtatctgtctcgtattaacgattatcggcgctattaactggggactgatcgggtttttccaatttgatttagtagcagccatcttcggcggccaaggatcagctctgtcgcggattatttacggccttgtcggcatcgccggcctgatcaatctcggcctgctgtttaagccgaacgaagaaacatcccgcgaggaagcggcaaatccggaagtcagataaacataaaaaaagcaccgaacatacatatccggtgctttttttaatgattattttttgataaggtctttgcggttggactgttcgatccactcttcaagcttatctttcaatgtgttgaaaccttgcggagcagatgtttcttcagaagcttgagccgctttcggttttcttggtttgctttcttttctttcaggcgccgcttgagtcgcacggatagaaaggctgatttttcctttttcttcgtcaaccgcaagtacttttacttgtacttcgtcaccgatagaaaggtgttcgttaatgtcttttacgaaaccgtgagtgacttcagaaatgtgaacaagtccttgagtttcttcatctaatgcaacaaacgcaccatacgcttgtaatcctgttactttaccagtgtaaacactgcccacttcaaattttgctgccattcataacaactcctaagttaaattaaatacagattatacgcaatttaaaattatatcatacaagtttgtttttcgcaaagagaacttttttacataatcatgtttaagcacagataaaggagggtatactatgattacgaaggctttctagtattcccccccttttatttggatgcgaaccgggttcgtatctttttttatgcccttttttcaacaaaccgtttgattctgacgagcgcttcctgaatctgctcaatggatgtcgcataggaacatctgatgtagccttcgccgctcgggccgaatacattccccggaacgacggctactttttcttcaatgagcagctgttccgcgaattcttctgaactcatgccggtcgactgaatggaaggaaaggcgtaaaatgctccgccggggtggtggcagccgagtccgatttcgttcaatgtctccacaatcaggtttcggcgtctccgatagcttttcttcattctttcgacgtcttcctggccgtttttcagcccttcaagcgccgcgtactgagccatggaaggcgcgcacatcatcgcgtgctgatgaattttgagcatcgcatccctgatcacgggaggcgccgccgtaaatccgagtctccatcccgtcatggcaaatgctttggagaagccggaaatgagaaccgtgcgttccttcatgccgcggatggcccccatgctcgtgaatggctcatcatacgtcagctcggcataaatttcatcggcaagcacgatcaagtcgtgtttttcagcgaaagcagcgatggattcaagctcttctttcgaatagacggaacctgtcggatttgacggcgagcatagaagcagcgcttttgttttgtccgtcagggccgcttcaaaatcggcggctgatgctttgaaaccttttgcagcgacagtctgaatcggcaccggcttcgcccccgtcaaggtcacgagtgattcatatgcgacaaaacacggttcgggaattaacatttcctctccaggattcataatggcgcggacagcgagatcaagcgcctggcttgcccctacagtaacgatcagttcactgtcaggtgaataactcaggccgaaccgctgatctaagtagcggctgatttcttctctcagttcataaagacccgcatttgccgtataagccgtataaccctgttctaaagaaagaatactcgcttccctcacgttccaggccgtcacaaagtcaggctctcccactcccagtgaaatgacgccttccatcgtagcggccagatcaaagaacttgcggatgcctgacggtttaatctgctgcacgtagtcagataaataagaagtcttcgtttccatttacggagacaccacgattcttttgtcatcgtctccgctttcaaagactttgccgtcatgcttatattttttcaggatgaagtgcgttgtcgtggaaacgacagactcaagggtggacaatttttcagacacgaagcttgccacgtctgacatcgtgttgccgcgaataacgacagataagtcatacacccctgacatcaggtacactgattcaacttcctggaatctgtatatccgctcagcgacttcatcaaagccgacatttcgttttggagtgacttttacgtcaatcatcgccgtgacgccttccaaaccgtcgactttgcgccagtcgatcatcgccgcataatcaatgatgactttttccttttcaagcttttcaatgatgcttttgacttcttcagcgggaatgtttgccattttcgcaatcgtttccgcatcaacgcggctgttttcgtctaaaatttctaatatttctgtttctttttcggtcagcttcatacgtttcacacctttgcattatcaaaaatcttcatgacattatatcacgattttcgacaaatgctaagaaaaacccgaaagaaaccagagctaaaatctgacaatcaaaaaagcctttacattacaacaaagaaaggacggcgaaggctctcatggaagctgtttcaccgattaaacgggccgcgatagacggagttgagctgtattacgagcattatgaaaatcccggcagacagacactcgtctgcgtacacggttttttatcttcggcattcagcttcagaaaactgatcccgctgctcagaaaccattatgatattatcgccgttgacctgcctcctttcgggcaatcggaaaagtcacggacattcgtatatacttacgcaaacctcgccaagcttctgatcggacttctggaaaagctcggtatcagccgggccgcactcatcggccattcaatgggcggccagatttccttatccgcgtctcttctcagacccgagcttttttctaaaatcgtcctgctgtgcagctcggggtatttaaagcgctcgcacccgtcgattatattcgggacgcatctcccttgttttgacctgtatcttaagtattggctttcaaaagacggcgtgctgaacaacctgttaaatgtcgttcacgaccggacgcttatcgatcaggaaatgattgacggttacgaaaaaccatttacagaccgccagattttcaaagcgatgacaaggtttatcagacatagggagggcgatttagagcccgaggatttgaagaaagtgcaaaaccccgctcttttaatctggggagaagaagaccgtgtcgttccggtctcagtcggaaaacggcttcatgacgacctgccggattccattctgtattcactcaaggatacggggcacctcgtacccgaagagcgcccggagtttgtttcggagcggatttttgaatttattcaataaaaaaaccggcggaaccgccggtttttaaggggtgcaggagctgctttcttttatgaacagaagctgctcggcggcctttcggcagccttcgatcggaagcttttgctcaaatgaagcttcaaagatatcctgaatggctgctgccagcttgtcggcacggtcttcactgtagacggcctgaacgatgtcgacggcttctgtctcataaaaatcttctccatatttaaacgggtcccacttggcaatgattttcatcatttccatgaccgcttggctttcttccattttcatcaccgcttataataaagtttgcaattctattttatcatagatacgctgtgcaaaataatgatactacaggagtgacatacatgaactttgatcttcgagaaaaccgtcttggcacacaatcggtgaaatgggacaaggcggaagcgttattcggcgtatcggatgcgcttccgatgtgggttgccgatatggatttccgcgctcccgaagcggtcactgacgccttaaaagcccgccttgaccacggcatattcggttatacgtctcctgacgaaaacacaagagaagccgtcgcttcatggcttgagacgcggcatggctaccggcccgcccccgcaagcatcgcgttcagtcccggtgttgtcacggcaatcagcatggccgtacaagcctttaccgaaccgggcgatccggtgttgattcaatcaccggtgtatacgcctttttatcagatgatcaaggaaaacaaacggcaggttttacataacccgttacgggaagaaaacggcgtctactgtatggattttgaggatcttgagaaaaagctgaacgattctgaggtcaagctgatgattctttgtaatccccacaatccgtccggcagagcatggagccgggatgagcttatgaagctcggatcgctgtgcgccgcccataacgtcaccgtcgtttctgacgagatacattccgacttaatgctgtacggaaagccgcatacgcctttcgcttctctgtctgaggagtttgcgcggatttccgttacttgtctcgcgccgagcaagacgtttaatattgccgggattcaggcatccgccattatcattcccgatcggtataagcgggcgaaattctccgccgtattgcatcagaacggaatttccagcctcaacacatttgcggttgcagcaatcgaagcggcctatacaaagggaggcccttggcttgacgcgctgattccttacattgaagggaatatgaaattggctgaggactttttaagaaaagaattgccgaaagtccgcatgatgaagcctgacgcttcctatttgatctggatggatttcagcgaatacggattttcggatgccgagctcaaagaaagaatgctcaaaaaagggaaaatcatattagaaccgggaacaaaatacggaccgggcggcgaaggatttatgagacttaatgtcggctgttcagccgccgccgtaaaagaagggcttaagagaatgaaagcagcgctcgcttagcagcggaaagaacgcctttatcagatgagataagggcgttcgctttagagaaatatatacttttttttccggtaaagatgttataatagattcatatttacataggaaaggatttcgcataaatggagattgtaaaggattacctgcttcacttctcttttattttattccctatttttctttatcaagtcttctggctcagcaagcccgatttgcttgtgccgagagcgaaccgcctgctggtcgccgtatttgcagcgtcatcttccttattatgtacggcttttcccatccaggagcttcattccgtccgttacggtttgcagctgattcccattatcgtctgcctgctttattccggtaccgccgcaggacttgccgcaggggcggcatccgttttttttcagctcatatggtttgaaccttccgctctttttttcttatccttaattccttttttaatcatcatccctatccagctccaaacgaaatggccttttttttcaaagcggaagaaactgcttttcgctcttctcatcggctgcactgaaaccgccttattaaccgcatctgtcttcatctattccgcgaccaatattttcaattttcaaaatctatcttccgtttattacgaggcggcagtatctgttttttttcaagtcagcgcccttttgctgtgcatttatttgattgagatcattgatgagaatgcgtccatgcgggcaaggctgattcactcagaaaaaatggccgtcgtcagcgagcttgcggcaagcgtcgcccatgaagtccgcaatccgcttacggtcgtcagaggttttgtgcagctgctgttcagcggcgagcagcttcaggacaaatcccactccggatatcagaaacttgtgctgtccgaactcgaccgggctcagacgatcattacgaattatctcgatatggcgaagcaggatgactatgaaaaagaaaagtttgatatttctctgctcgtaaaggaaacaggttccttaatggagtcttatgccaattttaaatcggtgaccgtgactgttcaaagcgagcctgatttatatgtgttcggcgatgtaaaaaaactgaaacaggccttcattaatctgattaaaaacagtattgaagctgtgccctctgaaaacggccgaatcgaggtctccgtccaaaaacaggaagagataattctcattcagattacggataacggaatcggcatgtccgatgaagaactgcagaaactcggcaagccatattatacgctgaaaacgaacggcaccgggctcgggcttaccgtgacattctcgattattcagcatcatgaaggctccgtctgtttcaccagcggcgagcactcgggcacaacggcctcagtcaggcttccggcgctgttcactagccaaccgcgttgatcttttatagaataactagagagaggtgaacgctatgaatacgtttgaaattggcacaatcgtaaaagggttttataaaacaggagcatacataggggaagtgacagacgtcaggcccaatcactatttagtgaaaattaaagccgttctgacgcatcccgctcaaggagatcttcatcatccgaagcaggcggatgttccgttttttcatgaaagaagagcgcttgcattcggggaacagacaaacataccgcatcagatggtcaaaccgtttgatggcgaggtgcctgattatacggcttctttacaagcggcgtctgcccggctgaaagatcagcttacagcggacggctcagaatgggcggaacgttcgctcgacaacttggccgcgttagagcgtgactattttaaacgaacttgacccagtcggcatgattgggtttttttatgtggcccggcgaaacagttcagtcagatcgacgcgatcaccgatcgtcggaggtttcggtttttcaagatattgtttatcccgctcgacaagcttgaataatttgtatgtcgtcagcgcatcatccagcgctttatgatgcgtgcccgtccctttatcgccatactcttctgccgctttccaaaggccggtcaatgttctgtcgccgaagaagtttttgtattcaagggacagatcccgaagttctcctttgaacggaaaagggatgtggttaaacatgcaattttgctttaacactttcatatccatattgccccaggtgacgatcgtacagtttttatcaggatcaagctcatttaatttgcggatgaattcattaaacgtgattccgccgtccacgtctttttgggtgatattcagaaaggttttgcatcgtttcgtcagcttcggaaattttttcggtttgatataactcgaaaacgtttcagtcacttcatcattcaccgtcttgacaatccccgcttcaataatctcgggaaagaaattttgcgggctgtattttccgtcaggcattgtaaattcaaaatcaataatgagcagactgcgctgatccacttttttacacctgcctttcctccgatcaaaaatgatattttatgatagtatatcagtttcccctctgaaactttcttcattttctaaaaataatgaattttcctatatccgcatcgaaaatacaaataccggattcattcctatatactaatgattagatacgcgaaaagtaaagaaggtgatgttatttctgtccgtaagaagaacttcgtcgtcatttggattacaaatttctttatttccgccagcatgaccatgattgttccgtttctttcgttatatatcgaaacgatcagcccccattcgggcgggtatgtgcagagatggagcgggtatgtgttcggcgtcacgtttttaatggcgtttgtgatttccccgttttggggaagattcggcgataagcgcggctacaaaaaaattctcttgattacaggaaccggcattgccgtcagcattttattgatggggtttgtgacatccgtttatcagctgtttgtcctgcggctgcttatgggtctagtaacaggctttgttccgacatcgcttgccatgatttcggcgcagacgccgaaagagactgccgggaagacgctcggcacgctgcagatgggtcaggtgtcaggcactttattcggaccgatgctgggcgggctgctcgctgacagcttcgggtttacgtacacattttttattacgtcttttgtcattttcgcatccgtgcttctcgttttatttcaggtcaatgagcagccgctcggcgagaaacaaaacaagcggaaaacctattccagaaaacaggtgctctcctatatttttcaccagcccgcgctttgggcgatgatggtgcttactatgatcgtgcagaccggcaatttcagcattcagccgctgctcgctttatatgtcaatgagctgcacggacctgttaatttagcttttttctccggaatggcgttttcagcgaccggactcggaagcttattgcttgcccggaaatggggggacttcggcgaccgcttcggccacagccggattttaatcgtgcttttgattgcctcagcggtgtttttcattccgcaggcgctcgcctcctccctctccattctgttagtcttcagatttctgttcggcatggtcatgggcggcacgctcccctgcattacggccgcaatccgcgtcagggcgccgggcagcatccagggagaggtgctcggctataacgtcagctttcgttttctcggaaatgtgctcggccctctgctcggaggtgcggtctcgagcggtttttccatttcggctgctttctacgtcaccgcctttctctttttaataggcgcggggctcttatggatggcgggacatttgcaaaaggatacagcgtcaaatgcgggctgaccggcagcgatcacgatttcttctaaatttaaccttctcgtattcttaaaagaatgatacgatatggctagaaatcaggagaaaagagagtgaccatggtacgtaaaataatcggatggattttgctgctcggcattatcccgttgtgtgcatttacagttattgcttccggcaaagaggtaaaacaaatcaagccttttgatcaggtgctcgataaacatattgatttaaaagcgatcaacctggttcaaaacagttacatgtatgacagggacggaagccttgtttctgagattgtcagcgatcatgagaaccgcgtgatcgtgccctttaataaaataccgaatgaggtaaaacaactgtttttaacctctgaagaccgtcatttttatgagcataaagggtttgactttatggggatggtcagggcggccgcctccaatttcaaagatcataaaattgatcagggcgccagcaccatcacccagcagctggcaaggaatgtgtatttaagccatgaacgcaccttcagccgaaaactgacggagctggcctattcctatcagcttgagaaaaaatacagcaaagatgagattttagaaggctacttaaatacgatttattttaataacggcgtatacggtgtcggttcggcggcacaattttatttcagcaagccgctgaaatctctcactttgggagaaatggcctttatctgcgccatccctaataaccctacattatatgatcctctcaagcattttgattatacgaaaaaacgacaagtcagattgcttaacggattaaaaaaagcaggcgttatatccgggaaacagctgaaaaaagccgaaaaggaaaagatcaagcttgatataaacgaaaaaacaaataaatatcctgactatgtttcctatgtaaatgatgaattcacacagcttgtttcatcatccgaaggctatgacaaacgtcttgaaaaagcttccggaaaggcgaaacaaaaaatacagagtgagctttcagacagagtcagcacattgttaaaagacggcgtgaagatttatacggcgctgaatccgtatatgcaaaaccaggttgtcgcccaagtgaatcaaaatctgccgtatgcaggcgtccaaggcggagcggccgtgattaatcatcagacacatcagattatcgcgctttcaggcgggaaagattaccataaatatgatttcaaccgtgcctatcaggcatacagacagcccggttcatccattaagccgctgcttgattacggaccttacattgaaaagaccggcgcaacgccacacagcaagattgacgcaagcaaattctgcagtgcggattactgtccgcaaaactacaataaccgcacgtacggtacggtcacgctggaaacggcgtttaaatactcgtacaacacaccggccatcagaatcatggaccgcgtcggcgtcaataaggcgttcagctaccttgaaccgtttcatttcgcgaagctggtcagcgcggattaccgtctgcctgcggcgcttggcggttttacaaacggcatgacgccgcttgaaatgaccaatgcgtacaccacgttcggcaacaacggcgtttatacgccgagtcacgcgattacaaaagtgactgatttaaaaggaaaaacgatattaaaatggaaagatgagccgacgcaggtattcagcgtgcggaccaacatgcagatcaaagaaatgatgaaagccgtcgtcaagagcggtacaggaaagaaagcgaactttaaagctccgtacgtcggcggaaaatcaggaacgtcaaatgactatcacgatatgtggtttgtcggcctgacggacgcttatacgatgggggtatgggtcggcaaggatacaccgtcaagcgtcgaataccttcatgacgcaagccctcagctttcgatctggaaaaacacgctgcaggcagcttattaaagataacggaggggatccgctttggaaccagctcagcttccggaccgcgtacttttgtttgacggcgtctgcaacttatgcagcggcgccgttcaattcatcattaaacgcgatccggccggcaaaatctcatttgcatcattgcaatcagataccgcccgggagcttttggcatcagaaggacttccgacagaacaatttgacagcatgatttttatcgaaaacgggcggatatacaaaaaatccgcagccgtgttaaaggtttcccgtcatctccgcggagcctggcggctgtcagcggtttttttcgcagtgccccgccccctcagggacagagcctattctttcatcgcccggcgccgctacaaatggttcggaaaaagggaagcatgcatgctcccctcccctgagatcaaaaacagatttctgtcttaacaaaaatggctagcttacacaggtaagctagccattatgctattataaagcttgataaagatgtacaaaataccgataacaaaagtaaaccaaaacagaatctcaagcaatataaaaccgatcagcgaaacgatcgagagtgtcgaatagattctgtacaccatgaaaatcaaataaacgagcgtaacaacggcaaataacgccgcaatccaaaaaccattctgcacgagcacaaaggaaagaattcctccgcctacataaattaaagagcctaatctgatttttttcagattgtccccttcagggtcatttgtgaaaaacaaaagagacagctctgtcactgtgtttgcaatcagcttcaaagccgaaaaaagcataaaatacacaagggcgaacgctgcaaaaagcgccagtctgatccctttctcagagaaataatccagcatcccctgatacatgccgagcgtctgaagtatcttcatgacataaagcgaggtagaaatggataatgacgaactaaaaagcagaatcgcaacgagcggaaaataacccgtccaataagtatttttcatataaaaagtccctttctgtaatctacctcacttattatggaggacttaaaacacattgacaagataaaaaataccatttttcctcacttttacgaaataagggcctgatcttcacaaaccggctttttcggagtaaagtagaacgcgggaatgataaacgtaaggaaggctgttatgaaaaaaacattaaaattgcaaacccgattaacgatattcgtctgtattgtcgtccttatcgcactttgtatcacctttttcacgatcagcgtccaaacagcagaccgcgtgaaagaagaagaacggacgaccgcgctgcgcaccgcaaagctggtcgcggaaacaccgagtgtcgcgcgggcattgcaaacaagaaaagggctgaaagagctccgggattatacattagacgtccagcatacgacaggaaccgaatttgtcgtggtgatggatatgaacagcatccgcctcacccaccccgacgcaaataaaatcgggaagaaattcaccggcggagacgaacagccggcgatgcacggacatatcaaaacgagcacatcagcgggaactctcggaaaatccatgagagccttcgtaccgatctatggaaaagataaaaaacaagtgggcgtcgtttcggtcggaatttcgcttaacaaaatacaggatgtcgtcagccacagtttgagaccgctttatttcatcatctgcgtaagtatttttgtcggcgtcatcggagccgtcattgtcgcccgcaccgtcaaaaacattatgtacggtcttgagccttatgagatcgccaccctcctcgaagagcggagcgccatgctcgaatcaacgaaggaaggcattctggcggttgacgcgcggggaaaaatcaagctcgccaatgcggaagcgaaacggctttttattaaaatgggtattccgactaatccggtcgatcaagatgtgaacgatattctcccgaaaagccggctgaaacaagtgattgaaacgaaaaaaccgcttcaggacagggatatccgcattaacgggcttgagctggtctttaatgaggttccgattcatctgaaaggacaaaccgtcggagcgatcgccacgttcagggacaaaacggaggtcaaacatttagcagaacagctgtccggtgttaaaatgtatgcaaacgcattaagagcccagtctcatgaattcatgaataagcttcatgtcattttagggcttgtccagttaaaagaatacgatgatctcggcacttacattaaagacattgccattcagcagaagacggaaacaagcgagattataagtgatgtcaaaagtccggttctcgcagggtttcttctaggaaaacaaagctacatacgcgaacagggcgctgatctggacattcagctcggcagcctgatcccgaatgcggcagatccggccgtcatccatgagctcattacgattatcggaaacctgttaaacaacgcgctcgacgcggtggcgcagatgccgaaaaaaaacattacgtgctcgatgcggtttcaggatcgccagcttgatatagagattacggacacgggagccggaatgtctgcggcagaccaagcccgtatttttgaacaaggttattccacgaaagggacaaaccgggggttcggcctctatttcacccagcaggcaacagaaaatttaaaaggccatatgattgtgacaagtgaaaagaatgaaggaacgactttcagtcttcgcattccgtatgaaccgaaggaggaaaatgatgattaatgtactcatagttgaagacgaccccatggtgggtgaattaaataaacgctatctcagccagattgaaggatttcagctgaaagggatcgcatcatcctttcaaagcgcgctgcacgtgctgagcgagcatcatatcgatctcatccttcttgacatttacatgccgggaaaaaacgggcttgagctattaacggaaatccgcaaacaaaatgaatcggttgatgtcatcgtcatttcggccgcaagcgagctggacgtcatcaaaaaaacgcttcggtacggcgccgtcgattatttaatcaaaccatttgaatttgaccgctttcaaaccgctctttccgactacagacgcaagcagaaagtttatcaatcacacagaagcatgacacagaaagaattggatgccgagctttttcaaaagaaagaagcggcggaaaaggttcaccttccgaagggattgacaaaaagcacgcttaaactcatctgggcgagcattgaatctttcggtgacggctcttttaccacggaagatctcgccaagcatactgaaatctcgcaagtctccatccggaaataccttaaatttctggaagacatacaagtgctgaatgtagagatggcgtacggcacgatcggcagacccgtcttccaatatcatatcaacaccggcaatgtcagcagcatcaaacaatatttataatgtcaaaaagcgccgttccgctgtgaacggtgcttttttactgtcatatcccgtgacaaaaggcttgagattccttttttgtatgctatataaggataatgacctggctgatcctcctctgttttatccagatgaggaagccgattcataaaattgatattttttaaaaaataagcaaatttctatttatttatggcgggtaaaatgataaattatgattggttagcagatcttttcagataagtcataagtcccgaacccggaagagacagccgctcaaggcgggaaaaagagagacgtctcatcattattatcagaaagttttttcgattctgcatccggtacggggactcaagtctgaattgaacggcacagccatattttacaggggggttatatctttgaaaaaacgcaaaatcggaatggcgatggcgctcatcgcggcggccggaaccatattaagcgcatgcggttcaagtgacaaagcaaacggctccggcagtaaaaactttaccgtcggcatggtaacggacatcggcggtgtcgatgacaaatcatttaaccagtccgcctgggaaggtattcaggcattcggaaaagacaacgggcttacaaaaggcaaaagcggttttgactatcttcaatcaaaatcagatgcagattatacaacgaacttaaataaattagcgcgggaacactttgacctgatttacggcgttgggtatctgatgcaggattccatcagcgaaatcgccgatcagcgcaaagacacaaattttgcgatcattgacgccgttgtcaaaaaagacaacgtggcgagccttacatttaaagagcaggaaggttcattcctcgtgggagcagccgctgcgctatcaagcaaaacgggaaaagtcggattcgtgggcggaatggagtctgaattgatcaaaaaattcgaaatcggcttccgcgcgggtgtacaagccgcaaatccgaaagcgaccgtcgaagtgaaatatgcgggcggatttgacaaagccgatgtcggcaaggcgacggctgaaagcatgtacaaatcaggcgttgacgtcatttatcacgcggccggcgcaacgggaacgggcgtcttcacagaagcgaaaaatctgaaaaaagaagatccgaagcggaacgtatgggttatcggtgttgataaagaccagtacgcggaaggtcaagtcaaaggcacaaaagacaatgtcactctcacatcaatggtcaaaaaagtggatacagccgtagaggacttaacgaaaaaagcaagtgacgggaaattcccgggcggcaaaacattaacctacggtttggcgcaagatgcagtcggcatctcggatcacaaggagaacctttctgacgatgtcatcaaagcaacagacgattggaagaagaaaatcgcggacggactcgagatcccttcaactgaaaaagaattgaaatccttcaaggctgagtaagaaccaggggataaggagacttccgtgcttatcccctctcttttatgaaaagagcggtgaaggaaaagctgcatctcttgcagcttttcttttgccaagctctttctcatcaaagtatctctgaaaaggagcgtcaaatcggtggattatatcattgaaatgcttaatatacgcaaggagtttcccggaatcgtcgccaatgatgacgtcacgcttcaagtgaaaaaaggcgaaatacatgcccttctcggtgaaaacggcgccggaaaatcgacactcatgaacgttttattcggcctgtatcagccggaaaaaggcgagatcctggtgcggggcgaacgcgttcacatcaacagcccgaacagagccaacgatctcggcatcgggatggtgcaccagcattttatgcttgtggatacctttaccgtctcagaaaatatcattctcggaaaagagccgaaaactttcggccgaattgacagacagcgcgccgcccgggacgtgcgcgatatttccgaccgttacggcctgcacattgatcctgaagccaaagttgccgatatttccgtcggtatgcagcagcgggcggaaatattaaagaccctctaccggggcgccgacattctcatttttgacgagccgaccgcggtgctgaccccgcacgaaattcaagaactgattcagattatgaaaaatcttgtcaatgaaggaaaatcaatcatcctcatcacccacaaattaaaagagattatggaagtctgcgaccgtgtcaccattatccggaaaggaaaaggcattacaacactcgatgtcgcacatacggatcaagatgaactggcaagccttatggtcggacgcgaagtgtcattcaagacggataaacaagcggccgatccgaaacaagaagtgctttcactttctgatgtaacggttaaggacgcgcgcggcgttgaggcggtcaaacagctctccctctcagtcagatccggtgaaatcgtcggcattgcgggcgttgacggaaacggccagtctgaattaattgaagccattacaggtctcagaaaaacgaatgccggcacgatcacgttaaacggcaaacagctgcaaaacatgccgcccaggaaagtcactgaagccggcatcgggcatattccgcaggacaggcataaacacgggctcgtccttgattttccgatcggagaaaatatcgtgctgcaaagttattaccaaaagccctactcttctttcggcatattaaataaacacacgatttatgacaaagcgcgaagcctgattgaagaatacgatgtcagaacacctgatgaatatacgcctgcgcgcgctctctccggggggaatcagcaaaaggccattatcggccgggaagtggacagaaatccggatcttttaattgcggcccagccgacgcggggactcgatgtcggcgcgattgaattcgtccataaaaagatcattgagcagcgtgacgccggtaaagcggtgcttctgttatcttttgaacttgatgaaataatgaatctcagcgatcgcatcgccgtcatctttgaaggcagcatcatcgcaaacgtcaatccgcttgaaacaaacgagcaggagctcggacttttaatggcgggaagtaagcaaatggaggcggggaaaacacatgattaatcgactttctcatctggctgtgccgctgattgcgatcatccttggattagctgcgggtgcggtcatcatgctcgccagcggctataatgtcgtaagcgggtattcggctctttggagcggcattttcggtgaagtgtattacatcggggaatcgatccggcagattacgccatatattttgtccggattggccgtggcattcgcatttcggaccggcctgtttaatatcggggttgaaggacagctccttgtcggctggaccgccgcggtgtgggtcggcgcttcctttgacgccccctcttacatccaccttccgctttcgttattggcggctgcggctgcgggcggcatttggggcctgattcccggatttttaaaagcccgtttttttgtccacgaagtgattgtcacgatcatgatgaattatatcgctcttcatttaaccaattatctcatttccgatgtcatgacggaccaccgggacaaaacagacaaaattcatgaaagcgcgtcgctccgctcgccgtttttagagcagctgacagattactcccgccttcactggggcattctgatcgctctgtttgcggcagtcctcatgtggtttatcattcataaaacaaaaagcggatttgaattccgggctgtcggctttaaccagcacgccgcacaatacgccggaatgagcgtcagaaaaaatatgatgtacgccatgatgatttccggcgccttcgcggggcttgccggcgcgatggaaggactcggaacctttcaatacgcggcggttaagggcgcctttaccggcgtcggcttcgacggcattgcggttgcgcttctcggcggcagcacggcaatcggcgttgttctggcggcatgtcttctcggcggccttaaagtcggggcattaaatatgccgattgaatccggggtgccttctgaagtcgttgacatcgtcatcgccattattattttgtttgtggcatcaagctacgccatccgtctcatccttgataaattgaagaaaaagggggcgaagtaagtggacttcctgcagattttatccattattgtcccggcaacactcgtatatgcggctccgcttattttaactgctctcggcggtgtgttttctgaaagatctggggttgtcaacatcggtcttgaaggactgatgattatcggcgcctttacaagcgtcatgttcaacttatttttcggacgcgagcttggcgccgccgctccgtggctcgccttggctgcggctatgattgccggcggactgttctcactgatccacgcggccgccgcggtttctttccgcgccgatcagacggtaaccggtgtggcgatcaatatgctcgcattaggagcgacactgtttatcgtcaagctgatctacggaaaggcccagactgataaaatcccggagcccttttacaaaacgaacattcccgggttaagcgatattccggttttaggaaagattttcttttctgacgtatattatacgtcgattttagccatcgtactggcctttgtttcctggtttattttattcaaaacgccgttcggcctccgcatccgttctgtcggggaacatccgatggcggccgatacgatgggaatcaacgtgttcggcatgcgctatatcggcgtcatgatcagcgggctgttcggcgggctcggcggcggtgtatatgcttccacgatcgcgcttgatttcacgcactccaccatttccggacaaggctttatcgctctcgccgcgctggttttcggcaaatggcatccgatcggcgcgctcggggctgcgctgttcttcgggtttgcacagagtttgagcattatcggctcgcttttgcccctgttcaaagacattccgaatgtatacatgctgatggctccttacattctgaccattctcgcgcttgccggcttcatcggccgcgcggatgcgcctaaagccaacggcatcccttacattaaaggaaaacgctgattgccacaaaaaaaagagttccgcaccctggtgccggaactcttttcatctatatacgattctgatatactcacgcggctgaaacggtgtttgcattgattcagccgcactcagcttgtcttccgcgtattccgcaccgagaaaaaaacgctcccaattatctgcctccgtctgctgccgcgttttgcagaaatcgtccgctatgaatgttcctgcaataatagaacaaaatattccaatacaggccgccgcctttctcttcatctgaccagctccttttttaaaagcttgatctgaaagataaatgtatatacaaagatcaggatatttgataaatttattttgggttcaaaagaccacaaaaacacagagaggaatacattatgccgtagcagggtaaaaaaaagtgcgatataatttgtactgggtcctatgaccgtgaattgattgattcactcttacataaagcagttgcttgatgaaaaaacaagcaaaggaggtcttctgttgcagctgttacatttcgcgattttggcgccttttttatttgcatttatcgttccctttctttataaacgggtaaaacaagtccatacaggctggtttgtgctgatagtgcccgttgtgctgtttgtttactttatcagcaagctccctgtaacaatggctggggaaaccgtccggtatgcggccgaatggattccgtccctcggtattaactataccgtttatcttgacggactcgggctgttattcgctttattgattacgggcatcggctctttagtgacgctttacagtattttttacttatcgaaggacaaagaaaagctcggccccttttatgtgtacctgctgatgtttatgggcgcgatgctcggcgttgtgctcgtcgataacgtcatcgtgctttatatgttctgggagctgacaagcctgtcatccttcttattaatcgggtattggcataagcggaagaaatcacgctacggggcggaaaagtcactgctgattaccgtcggcggcgggctgtgcatgctcggcggctttatcctgctgtatctgatgacggattctttcagtatcagggaaatggtcaaccaggtgcatattatcgcaggccatccattctttattccggcgatggttctcctgttattgggagcctttacgaaatcagcgcagtttccgttttatatctggctgcctgatgccatggaggcgccgactcctgtcagcgcctatctgcactcggctacaatggtgaaagcgggcatttatctgattgccagattcagtccggtttttgcattttcacccgtctggttttggacggttgcctcagtcggtctgatcacgatggtatgggcttcctttaatgcgatgaaacaaaccgatttaaaagcgattctggcattttccacagtcagccagctcggtatgattgtatcgatgctcggcgcaggagccgccgcgcttcattaccagcattcagagtattttacggcggctgtcaccgcggctgtgtttcacttaattaaccatgctacttttaaaggaagtttatttatggcggtcggcattatcgaccatgaaacgggaacacgggacatccgcaggctcggcggactgatggcgcttatgccggtaacgttcaccgtttcactgatcggaacgttttccatggcgggcctccctccgtttaacggctttttaagtaaagaaatgttctttacaagtatgctgcggattgctcatgcagatattttcagtcttgatacatggggcgtgctgttccccgttctcgcatggatcgggagcgtcttcactttcatctacagcatgaagctgtttttcagaacgttcagcggggcgcgcaaacctgatcagcttgaaaagacgccgcatgaagcaccgctcggcatgctgatttcgccggtcattcttgccgcttgcgccgtcagtctgttttttgcaccgaacgttttgtcttacagcctgattgaaccggcgatgaactccatttatccggctctgttaaccggcggagatacattccatgtccaaatttcccagtggcacggggtgacggctgaggtaatgatgaccctcggcatcatcattgtcggcacgatcggttacgtaacgctgtctaaatgggagcgtttgtacggtctgtttccgaaaaaactgacgctgaacaagctttacgatgcggtgacgggcagtatggaaaaaagatcttaccagctgacgtcatcttatatgaccggatttttgcgggattatctgctgtatatctttgcggcgtttatcattctcatcggaacggcgttcgtcacaaaaggcggcttttccatgacagcgaaaggcatggctgaaatcggcctgtatgaaatcgtgctgtccctcgttatggtgagcgcaacgattgcgactgtgttcgccaaatcgcggctgacggccattatctcactcggtgttgtcgggtacacactcgcgctgtttttcgtgattttcagagcgcccgatctggcgctcacgcagctcgtcattgagacgatatccgtcgccttgtttcttctttgtttttaccatctgccgaaaatgcggcggaaaaagaagacaagaacattccggatgacgaattttatcatttctctcggtgtcggcgtcatcgtgacaatgctcggaatcgcgtcttccagcgaaaaaacaaaagacagcatctcctcctttttcaccgcttacagccataagctcgggggaggaaacaatatcgtcaatgtcatcctcgttgatttcaggggatttgatacgatgtttgaaatcacggtgctgtcgattgccgcactcgggatttacggcatgatcagaacaaaagtaaaagaggagggagaagagcgttgagacagcaaaacacaaacgacatcatccttcagacggcaacgaagcttgtatcttttatcattctgcttttctctttctatttatttttatcggggcataacgctcccggcggaggatttgtcggcggactgattacgtcttcggccatcgtgctgttgcttttggcctttgatttaaaaaccgtcaaatcgattttgcccgtcaattttatttatgtggcgggcgcgggtctgcttatcgcgattgcaacgggtgcaggttcgttcttattcggagcaccctttctcacccatacattcggccattttcatctcccggtgcttgggaatacggagcttgcgacggccactttgtttgatttaggtgtgtatctcgttgttgtcggcgtgacgatgaccattattcaaacgattggagaggaagaataatggaaatcttaatgtctgtcattgccggtattttgtttatggcggcaacctacctgctgctttctaaaagtctgctgcgcgtgattatcggcaccgcgcttttaagccacggcgtccatttgctgcttctgaccatgggcggactgaaaaaaggcgctcctcccatactgggcggaaaaagcacgtcgtttgtcgatccgctgccgcaggcactcatactgacggcgatcgttatttcgttcggcgtcacgtccttcctgcttgtgatggcgtttcgcgcctatcaggaactgaaaacggacgatatggatcgaatgaggggaaatgatcaacatgaataactttgtgatattgcctattctggtgccgctgcttgccgcagtgctgctgatttttatgaacaggcgcgtgatgctgatgcgggtattcagcactgccgcttcctgtgtctccatcgtcatcagcgccgctctcgttcagacggttttcacacacgggattcagacgctgacactcggcggctggaaagcgccgtacggcattgtgctcgccgcggatcagcttgccgcactgcttgttttgacaaccgccataatcgggctgctcgtcaccctgtactccttccgctccatcggagaaaaaagggagcgcgctttctattattcaggggtgcagtttcttctggccggcgtaagcggagcgtttttgacgggtgacctgttcaacatgtacgtcttttttgagcttctgcttatcgcgtcctacatgctgatcgtgcttggcggaacgaaaattcaattaagagaatcattgaagtatatcgtgtttaacattgtgtcatccgcgttttttgtcatcggcgtcggttacttatatgcggtgacgggcacgctgaatatggctgatctaagcgtgaaaataagtgaatcgggccagaccgggctgatcaccgtcatcggcgtccttcttctcgtcgttttcggtttaaagggcgggatattcccgctgtatttctggatgccgggctcttattacgccccgccggctgcgatttcggccctgttcgggtctcttttgacgaaagtcggcctgtacgccattttaagagtattcaccctgatctttattcacgatacgggctttacccaccaattgatgatgtggcttgcgatgctgacggtgttattcggcgtaatcggatctatcgccttttcggatgtcatgaaaatcgtcatctacaatattattacagccgtcggcgtgattttgttcggcattgccatgaacacgccggcctccattcaaggagcggtttattacttgattcacgatatgctgattaaaggagcgctgtttatgctcgccggcacgcttatcgcattgacaggcactgccagcctgcataaaatgggcggactgatcacccgttatcccgttttgggatggatgttctttatctcagccatatctctggccggcatcccgccgttcagcggatttatgggcaagctgaagatcgcggaaggcgggttcgataagggggaaactttgttttccgtattgattctcttatcaagcctgcttgtgctctattccgtgctgaaggtttttacgacggctttttggggggaagaaaaagaaatcccgggcgccggcagacggtccgcaaaaggacttctttatccggcagccgcttttctccttttgtcgcttctgttcgggctcggaaccgaatgggtttcaccgtatgtcaatcagacggctgagaatctgctgaatccggaaaaatacattgaagctgttttgaaggagtagatggcatggcttttcaactattattaaatgttcttctcgctgtttgctggatgtttctcacaaacagcctcagcgcggcgggttttatgaccggatttatcgcgggcttggcggcgctgttttttttccggcgcttcttctcgcggccgttttacatttggaaaatatggtcagtcatcaaactggcgctgatctttataaaggaattatatttggccaatgtcagcgtgctgaaaaccgttatatcgccgaaactgaacatccgcccgggcattttcgcgtttaagacggaattgacggaggattgggagatcacgctgctctcgctgttaatcactttaacaccgggtacgctcgtaatggatatctccgatgaccggtcgattctctatatacacgccatggacattgaagatgcggagaaagcgatccatgacatccgcgtctcttttgagaaagccattcaggaggtgagccgctgatgtttacgtttattctgcaattatcactcggcattatggcggtttcgactcttctgtacgtcattcgcgtcataaaagggcctacgataccggaccgggtcgtcgcgcttgatgggatcggcattaatctgattgccatgaccgcgcttgtatccattctcttaaacacatcggcctttttggacatcattctgctgctcggcattttatcgtttatcggcacgattgcctttgctaagtttttggagaaaggagagattatcgaaaatgatcgaaatcgttaaatgggccgtcgccgtttgtattctgatgggatcgctgatctgcctggtcgcgtctttcggcacactcaggcttcctgatgtgtatacgcgcgcccacgcctcttcaaaaggctcgacactcggcgttaatttggtattgctcggggtgttaggctacttgtggatgctgaccggagaaatttctgtaaaaatactgctcggcatcatttttatcctgctgacggcgccggtcggagcgcacctcatatgcagggccgcgtacaattcgggagcggcgcttgataaaagaagcgtacaggatgattacaaaggaatcagaaactttgtgatcaaacgaaaagaagattcatatttataaaaacaaacagccggacgattcagggttccggctgtttgtttattttgttataacagccagtgtgcagcgggaaacacagatcagcctttcccgttcatcgaaaatgttaatctcgtacacaatggttgccctgcctgtgtgaacgggtttcgcaatcgccgtgaccgtcccgccctctttcacggattttaaatgattggcattaatctcaagcccgacacacgcctggttcgaccggtcgataaaatgctgggccccgacacttgcaacagtctccgccagcgctgctgacgcgcctccatgcagatatccgaaaggctgcaccgtcctcttatccaccggcatcaccgccacgcatctctccggcgtgttttcagtgatttcaataccgagtgcgccgagcaatgtattgttcagattcataggtcattctcccttcaagatttatagtacgttatctgacttggcgatcagcaccgcttcagttcgggagccgacattcagcttgttaaaaatggatgtcaggctgtattcaattgaccgcttgcttaagtgaagcgcatctgcgatttcctgattggtcaaacctttttcgacctcttggagaatatgtcgctctctcggggttaaccgatcctgctcactttgaggggaagaagacgtttttgttttttgctgggtcatcagctgtttgaaataggagaaatcaactaaaatctgtccgttgagcacgtgatatatgtattgcatgattttctctttagattcggttttgctgatggcgccatgcaggcccgcgcggatggattcttcaaaataatcttcaacctcatagcctgtgtagacaatgattttacagagaggattctcttttaagattttcttggaaagctctatgccgctgatgtcatcacccagatttaaatccattaatatgagatcgtaagctgaaaaatcatgccggagaacgaattgttcactggcatcaggactgaggcaatcgacagaaagattcgtgtccgtttccagaatcgtcttggtgccctccatgacagccggatgatcatcaatcactagtatctttttcatggtttcctcccttttactcactcatttccattttattaaaaagacttggcttctgccaagtcgatttggtgataaattggttacaattccatttcaatatctactttaaaaccgtttccttcacttgtgtcgattttcatccgtccgtcaagcgcacggacgcgctccttaatacccgaaagacccatgctcatcgactgcccgccgccttcttcctgattgcatccgacaccgtcgtcttcataatgcagaatcactttattttgaatgctgatcagcataatcagcacctcattcgcctgtgaatgtttcatggcattcgaaagaaattcctgaataatgcggtacaaattcagctgcgtatccaaatccagcgccgccgtaaaccggcccgtattcagacggatatgaaacggcgcacgctcctgctgctgtgcggcaagcttggataccgccttgaccaggcccaaatcatacagcagctgaggccgaagctcatggcacgtctcccgggtcatcaaaatgacatcggacatctgctcattcatctgatgaagcttgtcctgcacctctaactggcaaggctcctctttcttaaaatcggccagaaacagctcacactggcgcttcaaagaaatcaagtcctgcagcactgaatcatgcagatcacgggccaaatccgaacgctgcttttcctctatcgtaaacatcagcttttttagccagaccgggtttgagccttgttgttttagatcttgtaaatggttcatgagttcttcgatctgtatcacattttccatagagacactcgtatagaaagacaatgtcttcagccatgaaatctcatctcgtgtcagtctcggtgtattaatagtggacaaacaaagcaaaacataagaacttcccccgcgttctcctatcttgattaaaaaaccgcggtttagctcaatgatttttccaatctctgaagtaactttcttaaattcttttgaatacatttcccagtcaggctcattatcctttttatcatgatataaaatgtcaccctcagaggtaacttcaaagacataagctttactgacaagtagaacatccagaatcgtctttttcagttctttaaacatttgttttaaagatgttatgcttctgataagctgagtatatttgaatatactatcttgataattaaatttttcagaaaaacgttttaaccgaaatttaaaatctattatttctttaaagtaaaatacagcaaacattacgataaagatgaaaacagtctgtctaataggattcatttgaagcgcatttgttcccgcccagaccgataaaactccgacaataactagcgttgggattacagccagtaaagtataatacctcattcttcctaatataaattctatatcaaatattttatttgcaacaaactgatatactaatccaaatgggataaggacaagcaatgaggctgatgccagtgctggaaatatataatcaccagttaaaatattaggtgcgacgtaaaaaagtaaaaatggagcaaaagaaagtgtatttgtcagaattaaaactttcaaaatataagcatgctctgaatatttatatttatataagtgatagaacacgagaacaaaacctgaaagagtaacgagaaaaaacgagataagattaaggtttgttataatgttttcaaaaggtaatttcttacggaaaaattccaggataatattaaaaatcggaaatatatataagaaattgattagacgatttgcaaacttctttcctaattcctcaaaatattgttgtatgaactgaagataaaatataggagaagctataaatgtgaacaaattgacatacctgttaaatgaatgtcctctaaatggtcctcctgcgcttatataagcaattgaaatatctaacaaaaacaaaattaaaatgtatcccgcaaacgattttcttgtttgattcacctttagaatgtaaaatatacatactatacttaaaaaataaaacacaagtggaagaacgaatacaaaaaagctataggatttgtctaaattaacaatatcaaaatcatctaaatgaatttgctttccatttctgcttacatctaaacttttgatatgactaagattatctccttttaaaaatttagcagatggtttttctttgttgatttttagaatgatgtcacctttttctaaacctacgaatttcccgtaagtagtttctgacatctctattacttggaattgtttgtttttattttcaataacttttgtcccgattataatcccatttatgtttatatatgaaacatagcaaacataaacgaggcttaagataatgactgaaatagtgaattgtttaataaagtttttcacatattacaccaccgaacattcatcctttttcccattgctctatttttccatcgtttttcacaattgaagattcttcaaatgaattgattaatatttgagtaatacctgaatcatagcctaataaacttgcttcattgacttttaatttttttaacacttccggatatttcaatatataattgatcaaatcctgcattatacttcaatccccctattaactacatattttttcaatttatctattttactggtttcaagatttagtttctctatagcattttcacatttttgcttatacaattggtgtaaaactgaaacatactgagtaacacctgcatcagttaatgtctgaataaaattgtttttatcagatataaacttaaggtgtgtttctctatgagaaaacatacgaaccaatttttcagaaggctcgttaaacagcctcttaaggtacaagttgattaacgtgtgtttatcttttaaaatatcactgcgtttagagctgaaaagagccagataatcactatatatctgttcaaacattcctttgtaataggaatacgtttcaacagtttcattatactttccagttgctaacatagtacctgccacattggatagagcgaatagactcccgcattttaatctaatgacctctaaactttcatcttctttctctggcttattgattatatcatcgtgttgtccttgcatagcgtcttgtgtatatttcagtatgtaagaaagaataaaaggattcatgttaattgaattaatcccctgcagccctgctgtgtataatgaaaaagctgcgcttaaagcttctgaacggtctatcttcatccaaagagcttgtttgttatcttcatcttcaagatcatcaataatatcggcggaaagcgtaagaatttcaattcccgccgcaagtttctcagcagtcttaaaatcccttccgccaaaaacttcataatgcaataaagcagattcagcaaaggttaaatattttctggattcaacaaacccaagaagaagctgtagtaaatgttgattgaatatgttttgctctattatactcttcattttattcttgatttggttggcatctaaacacatttgctcaataattgtcttcaccctcccattctattttactaaatgcaggtgatgaaagacagcaggtttttcgttttttaacaatcgtataatactttatccatgaaatggataaaaaatgcacaaaaaaaagacttgtttccaagtctttttaagaaattttcattgcatatgagaatttatcgagctgatcaatgcttttgttaatgtttcgtaatgagtcggttgtttctctgatatcattttcaagtcggaataataattgctttacttcttctaatttgttttccaccgtttccacactcctttttttgaaagatcaatgaattgtgtatggtgaacgagtcctaggtatttgatctgttactaatagtgtaaacgtttttgcgggatttttcaccgaaaagtatgtgtaaaagtatctgcgtgacaccgcaaaccgaggtaatcccatagtcccgaacagagcatttagcgaacaggactatataactaccagaaaggcagacgtttaggatgaagcagaccaatctggcggttctgctgtttttttaacggttttccgacaaaccggcaaggactatagtccctgccgtcgcaatttcaaaacagaatgggcgaacagcgtcgcataaccaccgacaaacaccgaaaagaccgcaacccccgcattgtggtcttttgcatgtcataactcgttatcacgccgcctatactcatatataacgaatgttttctcaggaaggaggccgccgtatgcattatgtgtatccatgcttccctgttttcgccgcgccataccggcatcctgcgcccagtgccccggttcacgcagatattttgacagcgtccgcaaaagaggctgcgggcatgctggaggatgcccgcctgctccttacgcggctgtcggcgtcaaaagagcttgcgcgccgtatcctcaccgcagcgcaatcatctgacaccgcagcggtcaagcggctcattaagcagaccggcatcaaaactgactttgacgtgacgtataatcccgacggcatccgtgtcagtctggtcagagagcaaagccggtttatcatcgccctcaggtggtcggcttaaagcggctcaatccacgatcagctgccggcaccattcgatcgcctgtaagtaacattcatacgcttcttctttgttcagttcttttccccactcgtcacagtcccagttgttgcattcaatggctttgacgaacgcgagcatcttataataatcgttttcataaccgagcagcgcctgtccgacttcatcgattaaaggcagttctttgatgatatcctccagctccctgtggagaagcgtatcgatgagcgaaaacatgccgatcagcatgtaagaagagggctggggccttccggttcttttcgccagcagttcgcacagtttggccctgattaaggaaatcttaatgatttctttttggcttgagtggcttttcgccgttaaatctctgaatgaaagaatgtaaatcaagcgcttaatctcattcagcccaagcatcatgatggcctgctggatgctgtctatcttttttttcagccttgtttgcgatccgtttaaaaaacgcagaatctgatacgataagctgacgtcccgctctatgtattccgtcacgcgctgtatattgggctggtcattgtttaattcgcttaaaagctggtagtaagaatgaaaatgaaacgtcagatcatttccgctgatgacacgcggttcactgaaaaaatatccttgaaacaggtgaaagccgtctatggccgcctgtttataatcttttctcgtctccactttctccgctaaataaatcagacttttacagctgtacgtctgaatgatttttttgcgctccagacgcgaggattgcaaaaaatcgatttttaaaatatcaatatatttcatcagctgttccactaactcttcattttccggattgatggcgtaaaaatcatcaagtgctaatgtatatcctaatttcttcagctgtctgcatcttgagatgagtgccggagtgatcggtatgtcctcaagaatttcgataataagctggtcaggatcaaaggaggtagggagatctgaaaacatcaggctttctgtaaaattcacaaagcagcgtttcccctcagtcagcttttcgattccgatgttgataaagctgttaataatgagatccgtcgtagctttatctccgtcagcggccgaataacggttctcttcgctctcccggtaaagaagttcataagcaacaacctgttcgtttctgttgaagataggctgtctcgcaacaaacaccttcattcatttacccccttagatgcggccttcgaacataagtatatcaaataacttgacgaaatttgtctaaatgtgaaaaatattatcacaacaaaaaggcctttccagagaaaggaaaggccgctttgtcttctattcaagttcccgtttcagctcgcttttgatttcatgaatccgctgcatcttgttgctccagcagtcttcgcttaaatcgaccggatattcttccggcttgctgatccgtttgtattcctcccacagaagtttgaggttatcctgcacgtattgctggatgtcggtaatttcgggattatcatagcataaaacgccgttttcaaaaatcggctcatgcaggtctttcgcatagaaatcagtgacgaatttgctgacgaacgtgtggacgggatggaacatttttaagcgtttctgatcatttacccgctcgtcataaagcgcgatataatcaccttccgagtggtgattcagcttgttgataatccggtatactctctttcttcccggcgttgtcactttttcagggtttgacgaaattttaatggtgtcggtcagtttgccgtcctcttcaatggcgacaagcttgtaaaccgcgccgagagccggctgatcgtatgcggtaatcagcttcgtgccgatgccccacgtatcgattttcgctccttgcgatttcagatttaatatcgtgtgctcatcaagatcgcttgaagcaatgacctttgcgtctgtgaaacccgcttcatcaagcatttcacgcgctttttttgacaggtacgccaagtccccgctatccaggcggatgccgatgaagttgatccggtcgccgaattcctttgcgactttaatcgcattcggcatgcccgaacggatcgtatcgtacgtatctacgagaaatacgcagtctttgtgggtctccgcatatttcttaaatgccgtatattcatcgcggtacgcttgtacgagcgcatgagcgtgcgtgccggataccggtatattaaaacgctttccggctcttacattactcgtcgcgctgaagccgccgatcaaagccgctctcgctccccacatagccgcatccatttcatgggcgcgccgcgttccgaattcgagggcgtcttcgtcaccgacaacgcctttaatgcgggctgctttcgtggcgattaatgtttggtaattcacaatgttaagcagagccgtctcaatcagctgggcttcgatcaggggcgcttcgacccgcataatcggttcgttgttaaaaacgagctcgccttctttcatgctgtaaagagatccggtaaaagaaagatcccgtaaatactcaatgaaatcatcagcatagtgcaattccgtttttaaataattcagatcgctgtcggtaaatttgaagttctccaagtattcgattgctttttctaagcccgcaaataccgcatagccgttttcaaagggaagctttctgaaaaaaagctcaaaaatcgcttttttctcatgaatgccgtctctccagtacgtttcggccatattaatttgataaagatctgtatgtaaagacaaactgtcgtctttaaaaccatgctccaccaaaattgttttccccttccttactctgccacttgcgctccgatgctgttcttaaaatgggacagggcccattcatgcccttccggattaaagctggccacagcgttttgatgaatgacgatctgaaagcccttgttgtaggcgtcaaccgccgtgtgaagaacgcagatgtccgtgcacaggcccgcaagatgcagctcagtgatctgccgttcccgcagtttcagctctaaatccgttcccgcaaaagcagaatatctcgttttttccatataatttacgttttttgcgtgtttatgtttctcataaagaggcgatagccttccgtacagctctttgccctccgtgccgttgatattatgcggaggaaacaggcgtgtctcgggatgaaaatcatcgtctgcatcatgcgaatcaaccgcaaagacaacgtaatcaccgttttctataaatgcttgcgtcaaactgacaatcgtatcttcaatctgtctcgcgggttctccgcaggttaatgccccgttctctgctgcaaaatcattcgtataatcaatgcatataaatgcttttttcatagccggcctccccgccattcatatgaaaaccattatatcctatctccacttgtaagtgaattggcattgtaaaatgacaaacggtgttttgcccttttaagatttcaggagtgagcgctgaaaaatgtcatcctgtacgtaaatgccgtcaaggttcacggcataatcggcggcaaaaaccaggccgagcggcgtttcgaattgaagatccgatatgacggagcttcggacaccggcaagtgcggcaagcttcatatatggtgaataagcatgatacgggagccttccgtttatatagagcaccgcgtcttttcggcttttcagcgcctgtttcacttcttcatacggctgcttttgcagcacctgccccttcgtcagggcaatgatgactctttcacgcagcgagcctaaaaataaatggcgttcatccggtttcgtctgcagagggccgtacatcccctgctgtaaataaaggtcaaccgttttgtcgctcatcggcctgtccctcctcagcttgttttacaattatcgccccggacgggacgcggtaaaccgcttcgttacatttcagccacccaatgggagatcttgccggcgagctctccggcgggttcttcttcaatcagcttgctgaatgattgtaaaagccgctgcgccagcgcctttttctcttcctcataggaaatgatcgtgctccactcaagttccggaacggctacaagggtatgctgttcttttttattttcatgcagatatacatcaccgatcattccggactgcacggtaatattcgcttttctgattttcataaaaaattccccttttataaagactgattctattatactacaaaaaagcgacagcctcctaaaaggaggctgtcacgcgttaaaccaatcaggttcgtcaaacacatcgatgtcttcaaagcgcgttttgctgaatttattagtaactttgacaaaatctccggaatgaaacgcccctgcccccgcgcctgagtggtcaacggctttgggagaaatggcaaacacgtcaccgaagctcgccgcagcgtctccggctaaactcataatataaatcggtcccacaattgcaggcatacccacacctccgcttttctttacagcattttatgcgctgcatcgggagttgtgcccgtttttatttcggcttgcggctgtcttcgagctttgaccgctgacgaagtttgataagccggacgatatttaagacgaaagcttttaaaaccgcgtaaaccggcacggccagaatcattgcgagaatgccgccgaaactgcccgctccgataagcagaagaataatggtgagcgggtgggtattgagccgtttcccgatgacaagcggagaaagcagattcccgtcaagctgctggacgacaacgacaacaataacggcaaacagcgccttagccggcgaatccataaacgcgataatcaccgcgggcgccgccccgagaaacggccccaggtacggaatgatattggtgacggcgatcaccatcccgagaattaacgcatactgcaggccgatgatccaatatccgataaagcatgccgttccgacaaagagacaaatcagcagctgtccttggaaataggcggccaatgtgacatataagtcattaaatattttgcgaccttccgcccggtaggaagtaggcaggattttaaccgccaagagcggaaaccgccggccgtccttcagcatataaaacaaaatgaacggaacggtgatcacgacaagcgtgatattcgtaacgacgccgaacacggccgacaggcttgccgtaatattttgcggaaggctttgtaaaaatcccgtcagagactgctggattttttctatcgacacataatcctgcgtcatcatccacgtaaaccatttggaatgggataattgcgccgtcaagacttgaatctgatgaatgtaatcagggaaattgttaatcagccccgtgacctgggaagccacaatcggtccgatggcggtgaacataaaggcaatcaggccgatgaaaacgagataaatgagcaggatcgccaatgtccgggggatttttttctcaagcaggcgcacgatcggattaaaaatgaaaaacaaaatgcccgagatcaaaatcggaaaaaacagagtggtgataaaaccgaaaaacggctgaaaaataaacgagactttcgttgatacgtaaataatgagcaaaacgagcaaaatttgcagcgtccaaaaatggacctttgatttcaacaagcggtttcctcctattgtcatgtgaacttgtactgtgattgtaccaaaaaaagccgccgtgcatctatgtatctcaaaaaagaagacgcaccggggttctatagggccgcctccggtttgcgccttattcgggctgttacacgcgttcggtataatcaggcatgacggaaaccacatggcggtttctgatataaaatacacggtcatgcgtttcttcaatggcgatgtgatccggagtggcatcaatcagccgtcctctgacaatgcgtctgacggtttgaatgataaaccttgagccgataagcttatggatggtctgataaacgtaaggatccactaacgagacgatttgcgggcttccttgatgggccattttcgctgatcccctttactatgttttccttcagcatatgcagcggacaaaggctttgacacagtacgtctatcggagcggaaaaggtgttagtgagcatgcggagttatgtaagcggaaaaggccgcatgagtggcctagactgagcttcttatgggatattgggcttggtcaattaactgatcaagcttttggatttgtttgagcgcggccgtgtgatccatttggcggtaatggtgatgtccgccgggttcttcatcgagttcatccgcttgtttcacgatttgctggagcgtattcttgtccagttcgccttcaggcagataggaatcggtgtgaagcagaatcgccagcgcaatgtccttcgccgctttcggttcttcaccgagccggatgagcagcttatgcgcccgttccgcgcctttaatggcatggatatcgtttcttctgtacttttcataatcccatttgccgtctgtgtaccattcataatggccgacgtcatgcagtaaagccgctttcgccgcaagatccgggctgacacctgcttttacggcaagacggtatgcatgaaacgcgcaggcgatcgcatgggcgacaccggaacgctgtaaatacttttgtgcgattggatgggtgaagacatccattaacgttacatttctcatggaaacccctccttaatatatttttagaatcctaacataaatcgagaagaaactcaattcatctgatacatttcttataccccttatatgttgtttcattcatcatatgcggccggaccccgaagtgattgtacaaacaaaaaagagcagcgtgaacgctgctctacaaaaattctttaatctcgtatatccgtccgttttccggctcgcccgcgatcagtgagtgaatgacgccggcgatgtattcaggacttctgaggtttttcgtttctttcagattgcggaaccgttcgatgtcatggaaatcttcttttgacgaagaacggatgacagcctgcatgtctgtatccatcactcccggcgagaatgagatcatgcggaccggcagctcttcatcttcctgttcaaacccgaatgttctcgtaaacatatcaagccccgcttttgagctgcaatacgcgctccagcctttataaggatttttcgccgcgccagatgtgatattgacaattgttttgctgccgctgaacgcttcgaaacgctttgtgaacatttggctgagcaaaacgggcgccgtcagattaagggtgtagtgacggttcaattcttcggcggaagcctctttcgcccgcttgatcggttccaccatgccggcattgttgatcagtgtgacagcggaataccgcttcttctcagcttgatcaagaatcgccttcatctgccgctctgtatctgccagatcggttaaatcaacactgtattctgtcagcccctcacgcttttccccgcttatcgttcttgaaagcgcggcgacttcggctccttcttgaagcgcctgttccgtaagcgcccggcccaagccttttgacgcgcctgttataagaaaaaactgcatgaaactcctcctttttttcttattttacgggctgtcttcccgcaaacacaagcgattcgtttaccgctttgccttttcctgcgccgtgactttcgggatcagatagatcatcgccgcaatcccgaggaggatcaagacggcataaatgacaggcagcagataagaagtctttttctcttccgtctccatatctgccgaggtatgccgcaccgcaggctcggcaaatgtgatacccagttttttcgattgcgctttgatcgtattcggctccgtgtctgacgatgtaaacaactttgatatcagtttgtcatccgggttttcggccggctgatcaaaggtaatatccttctgttctttcggaagcgccgttttttcctcagagtaggcatcgtcgtgcaggtaatccgtacgaatttcaatgtctttcttttcatattcattcggcttgacatcagtattttcctcattcgcggctgcggcttggggaaggaggaggaaaaaggagagagcaaacagcagcaatcctttttccatgaacgtgttacgcctcataagactgatcactttcctccgttttttccgcaaacagccgaatgacgagcggaagcgccgccgcaatcagcgtaatgatcgcaagaaccgttacccccatcgcaaacagatggcccgttccgtattgaatatcgatatagactttcgaaaccggactgtcaaaggtgaagttcggcataatcaggtcgatcaaaggcgccacataaaagagaatgagcgctgatgatgcgatccatccggtaatcgagccgaagacaaaggctgcccggataaaagctgaactcgccgcaagcaagagaatcgtaaagactgaccatttaatcgtctgatcgtccggaagcgagtagatattcagaccgaacagactgatcatcaatccgaccataatgtttaaaatcccaaagagcgcgcctttgacaagaagcggcgcctgctgataatacgagctgaaatagccgatcagaagactgctgatcaggacgatcaccaaaatgacgaccggcggaacattctgaacccggtcttccggcacctctccgctgattttaagcgggttggcgagataatcgtaaacgtagccgttttcctgtccgtcaacgagcgcgttccctaaaatgccgtacacgtcatttctgatcaatttcgtggaatcgacgtttttgccccagttgctgttcagggtgtccgctttatgctggacgtcatttacgctttgctgcatattgttggtatagctgatgatgccggactggcgttctgacagatggcccatcgtgtcagacatttgcaggacttcgcggccgacggtatcctgagcgccgagcgccatcgttccggttaatccgtctccgctgaacgcggccgcttcctgcacagcgccttcagccagctgatcggatgctttcgccgcgctgtctgaaatgctggcgagctcatcgagcactccggcttgttcatctctgatataggtactgtagttatccgagaattcggtcatgcctttaatgaaattgctgatgtcttcatctgtctgcattttgttgttttttagattttcccagcttgctgtttcttccggtttgatggcgagaacggtttggacttcgccttgctgggctttcagcaccctgtttttcacatcaggcagcgggcccgcgtcaagagagtgatagagtgtcgcctcatacagggataaatcattatagtaactcattaaatcggatatcttttttgtattaatgtcagcggcaaatatctgttcaagagcagatttgcggccgccatccaatgacgggtagttcagaatgttctgttctgttcttacaatcattctgtaaacggtattgaagtcttgttctctcttttcttctgattcttccagctttttctttaatttttctgcgcgttttttgacgtcatcaatctggtctttaaggccttggatttcttcatcaagagcatcgagacgttttttcagttcttcattatgagtctgctgtttctcttccagctctttttcaatttgctgaatccgctctgcggcttggttcagcctttctttcgcctcagatatgtccgtgccgccgtccccttcagaatcgtttggatcgtccgccggctcatcagcaggcggagtgacgtttttagcggctgtcgcggtctggacagtttttggctcctgatcacctgtgttatcggaagcaggctgctcttcttttgtgccgtcttccgtttttccgtcttctccgtgattcgttccgttattcggatcggtatcgccggagttttcaccgtcatcgccttggcccggtttttcaggggccggattttctttttccggttcttttaatccgtcagaaatgtgattgatttcagcggagatgcgttttaactcgtcacgctgatcgtcaaggtcaattttcagatcgccgggtttttcttcttccggtttttcttcttctttcggttcatccgagccgtcatcacccgggtccttttccggaacggttaatgccggccgatcccttttcataagggtttggatactgttcagtgtttcaaatcttgcttgagctttatattgcgtcaaataattgtccagtaaattggattgaatattcgccatcccgtgttcctgatcaggaacctgcgcttctctcacctgttgggcggcaaaaagagccgatcccgtctggtcaagctgtgtctgcgcccggtttatgcctgaagacagcccgctcatcatcgtgctgaactggttggcggcctgctgtgctttaatggcattcagtccggttgtgatttgcttttgattttgttcctgcgcggccatcagcagttttttctgattttcttgatattgtttatagcgctcgaccgtatcggcaaagtctttgagcgtggttttggcttcatctgccgaggtcaatttttcttttgcatcgccctgcgcttcattcattgattttttcagttcgtcaatcaggtctttttgccgcttgatttcacctgccaagtcattggagctcggcttgtaaaagttgtacatgacgttttgaaactctgattctttattgacgatcttgtcaaaatcgcctcggacattgttcactttttgtgagacgaaattccaatataatgccgacatttttttattcattgatttttgggcgtcttctagctcacgctgcaccttttctttgttgacggcgttcaggttgctttgaatattgaatgtcagcgtggctttttgcggacgctccttgtcatagcttaagatgtcttttgaaaaatcggatggaatgtaaacgacggcgtcatacttcttagccgccagaccgttttcagccgcgctcctgttgacaaccgtccatgaataatccggacggccgccgagagcggccgctacttctttaccgaaatggacggattccttttcctcattttcatctgtttgtaagcccatgtcttcattcacgactgcgatttggcgggtggcgttaattttttgttttcccgggtcatcgccgataaaccggaaaaacagcaccggcagcagcagaatgatgacgaccgcggctattaatttgatcaggctttttcgttgttcagtcatctgacggcctccctttccgctgaacataaaggtatttggattttttgctccttcccgttttcaaccaaatagccgaagcccggctgaatgtccggttcctgcctttggtaaggcagcggaatgacattttgttcggattttttcacaagcagcatcgcgtggcggatctgtttcatttccgtcgttaaggaatcatagccttttgagaattcgctgtgattgcccgccgggataaaactgaagcccacatgcgcgtaagatttcataaacaacgccagtttgtcctgaatggcggtgtcgatcgtctgctggaatcttgtaatgccgtcggccattaacacgaccggagagaaactgagtttgtgcacatcgccatttttgacggcctgcgcatactgagcttcgcgctccgtgaaaatagcttctgccgtttcgatccactgccggacgtcttcttttgtatccagatagctgacctttgtttcctgcgcatactgcgacagtccgcggtcaatcgagtcaaacagcccgacccgttccgtaccttcacgcagcaggtgattcagcatcattttcaggatgtttgtttttccacgctgtgtctggcctaagataaggcaatgcttatttttgcccagatcaaagtacacagggctgaccttttcctcatgaagcccgacaggaatgcggaacggttcttgatccgggccgagacggagtgaaaattcgccggccgtcagcctatccggaagcatcggaatcgggtctgggccggctgttccggcgtggcgctcagctaatgctttgacatccgctttcagcgcctggaacatctcgaggtcattttccgcttcagccggaagaaacatttgcgcgaaatacagttcttctttttggatcatcacgcggcccgggatcggttcgagactgaacggcggacgcccgtaaatggagtatccttctgactgatccattaaataatggacgactttcgtttttatgttgtttaacagcgactggcggacggcgtttaccctcgttgcggtcagcaggaagtaaatgcctaagctttgcccgtcgcgtgaaatctggataaattccgtttctaattcatgcatttcatcttttacgatgtcgaaattgtcaattgtgataaatataaacggcagctcttcttcactgagcgaattgtacattttgatatggctgacttctttttctctgaacagccgtttccgccgctcgatttcttccttgatgcggatcatgaatttttcgatctttctcatttgatccattaagaaatagtctgcggtgtgcggaagctttgccaatggcagaagcgtgccgtttccgaaatcaaagatgtacatatgaagctcttccggcgtgtatccttccgcgaagttcatcaggaaggtgatggcagccactgacttgccgtagccggatgagccgaaaatgccaatgttgccgtcatccatcatcgtataagcgagaggcgcctgtctttgctgatcaggctcatcaacgcaggcgatgaagaagcggtctttttcctgcgcagggtaaagcgtgcgcgggatacgttcggcaagcggcggaagccacgggctcggcagcttttcaatgcccatttcattttgaatccgctcgatttcttcgactacggcttctatttctgccggggcgtcttttttcgccgcatcatccgcgtccacctcagacagcggaattaagcctgtgtcggtaacgatggcaatgtcatcctcggtgccgtatacatcttccatgtaaggggcgccgctccaagcagactggaactgctcatacacttcgttatttccgacttgcaagtagccgcgtccggtgaccgtaatattcgccgcatcactgtttttcaggatttctttactgtcacttgcatcctgcactttcagcgcgaccttaaagcgtgagttgctccatatttggtcgtcaatgatgccgcccggcttttgcgtggcgagaattaaatgcacaccaaggctccgtccgatgcgggccgcgctgacaagctccctgataaagtcaggctcttcgcttttcagctcggcgaattcatctgaaatcaaaaacaggtgcggcatcggaatctccgtttctccctgtttatacagctttgtatagtcattgatgtgattgacgcgatattgatcaaacagacgctgccgttttttcagctcgctcttaatggatgcaagcgccctgatactgaagtttctgcttccttcaatattcgtgatggtcccgagaaggtgcggcatcttgcggaacggctgggccattcctccgcccttatagtcaatcagcaaaaacgccgcttcatgcgggtggaaatgaacggccaatgacaggatgtacgtttgcagaaattcacttttcccggagccggtcgttcccgccagcaatccgtgcggcccgtgcgctttttcatgcaggtttaaatagacgatgtcgtcttttcctttatagccgatcggaacagccagcgattttgcagactcacttgtctcccacttctgcctgatgccgatttcttttacttccttcgcatgaaacagctccagaaatgagaccgtttcaggaatggaattcgtcattccgacctgatggtgcaatgtccgaagcgtccgggaaaaccgctcgttgtttgtccgttcatgcctgtccagcttaaacgggatctgcaccgcttttttctgctgaatgagaatgtctccctcatcttcattaatgtagcggacgagggtgtgaatgttttccgccaggctttccttcgtttccgcggcgatgattgccgagatgccgagatgctcatgccggccttcgatgtattctaaaatgacgtgctctgcgatcagctgctgatttgtgatgacaaagacaaaatgcggctggaagatctttttttctttatcttcttccaaatcccgctcccgcagcagctcgtaaatggacgataacaattgatcgcgggtctgttcattgtaaataaatcctttcgcgtacatatgaggcagctgaaattgcggcagccacttcatccattcccattccttatattcgtcctcatgaaagataaagacaaatcgcaggtcatggtagctgttgaagaacgcgagctggccgatcagctgatgaatttcatttttgacgatctggggtttcccgacaagccccatcggcccttcttgtaaatcaacggtcacgggcgcatggcggatatctttatacacacgctgcatgtgctgcgactgctccatcaagtcatccacatcacggttcgcaaggtctccgccgctcattgaaatctcgtagcttgccgggaccgtgcccgttccgagccggagcatcagaaaatccctgctttccagcgatttctcccaaatgcggccgctgatttcagaagttaaatatttcattttttcaaacgggggaaaatgatgcgtcagcacttgcagctgtttttccgacagcgtctgaagctctttccgtttgctttccaaatactgcttgtacacacgctcccgcttctcctcccgttttttccgctggtttttttcacggaaatactgcacggtggaggtaatgagagtcatcataaacatcgccaaagagacaaggatgaatatgcccctcggctgtataatggcgacaacccccattacaatcagcatgaccacaggaggcagaatgacgagccacagcccccggttattctgttcgctttcctgcgagggaaagctgaatgaaacgcggtcttctggaagatcgtagaccatgcgcggcgttcttcgatattgcgggtatttctttttcatttcggtgcttggttttaccgttttggttaaaccggtttgaagcttttcgtgatgaacgatttctaaaaggtcgtcctccgtcagcctcacacgcagaaaattccacagcagctcatctcccgtccggagcctttcgggagcttctgcaagtattccgttcacataaacgtcctggccatcagggacgacagaccagcatcctcccgactttcgcagataaaaagcccctgtttgagcggaggacggctctttgtatatatccgcttcctctgtttctgatgagaaaacgatctcatccttcccgccgataaaataaacggaggattcttctttgtcaggggtgagcagaagccgcatcgtctcttcttcaatccggcagggcatttcatttcctattgtcaattcgccggcatagttatttcccaggaaaacttcataacgatctgtttcttttcgataaagggttgcggcgttttgccgtaacggaagtgtgccgaccgtgattgtatctttcatatccggaccgatcgtaatcggctgagacggcgggagttcagacagctgaatcttttgtacgtgctctcggtaaaagacccataacagactcatatggcgaacctcctgacagcctgatcgttacctgcggccatttgatgtgtgctgttattttttttcatcttttttctcatctttcttgtcgttctctttgttatcttttgctttgtcttgtttgctttcatcctgtccggcggaagcttcggcggtgtcaccgttttcctccgcttctttatgctgctcctccgcctcttttttcgccttcgcaagctcgctttccacggcgtccagttctttctgcttttcgtcgtctttcatactgtcatccgctaataattgctgtttatattttgtaagtccgagccagatgtacgggttgtactcaagattgcggccgattttgatggcttcttcattttcccctctgccgatatcaatccaataaaggaaatgcttcgggtctgattgcagcgtgaccagattcccgatgtttttccgctgttcttctctcagattttcaactgccacataagaggaagcaagctcatactgcacagattccgggaggctttccgcatcgtatttggcgagtgtgtcaatgactttgctgtactgctgatttaaaaaatagcggttgctttccgtaattgcctcttgctttggctgggcgaaaaacagaacgtataaggagtaaagaagtgtcggcacaaggaggacggcaagcgccagaccggcgtatctttggattttccatttctttttcggcagttttatgtatgtcttgtccctttcttcgagggaatcaattgcggcttgaatggtttcttccagttcttcaatcgtctccgcctctagcacgctttttacctcaggagagaagtgaagcgtctccttgtacttcaaatattcatcgaaggtgtacgccccgtcagctgcaagcgccgcacaggctttgagctcttttaacaccctttctctatcttcctcataaggcggaaggctttcctttacgccgtaatgaagaaagtaaggcgtcagcgctttatcaaacacgatattttcaggggcggcaatcagattgagacgtttcagcttatgctgtttcacggcttggacgagacggtaggcaaattgccacctgctttttttatcttttccttttatatagcggaaagcctgataagaagaaggaggtttgattgtgatggttacttcgtcttctgaaactgagacctctttttgaaaaaaaggatcagcatctttaatcacgtttgcttccagcccgtcaagaagcttgattttttcccgctggaaggtgaacgtgaagcctgattcggtttcttcccggacggcgtctaattctgtttctaaataagatctgttatgacctgtcattccaccatgtcctttcataaaatttcaaggcggtctccgttcgtaatgccgcagtcagatagcttttgttctccggaaaaaaccgcttctttattgaccactctgatccaatagccttcacgcggcggaacggatacatgctgagcctgccgggcaatatcaatgacttttttcacagaatggtaatctgacaatctgagatcgaagacgctgccgttataatgtgttaaatctattgtaatatcaatatacatattcatatcacccttacatagaaagagcgccgtcttcttgattgaatcaggcgctccgtttcttcattcatcttattatccgcgaatttggttagcgatatcttggtcagtagactcaagcgtatttgccgtttgatcgagctgatgattcacatcttgaagcaattcagacattttaataaatgaaggtttcagctgctcatattgatctgcaaatgcttcacttgaagcaccttcccacatgcctttcaaatcagaaatcatgcggttcaggcggtcaacctgattcatgacttcctgactttcaacgccatattgcttagccatcgctcttagctcttcgggtgtgacacgaattaatccagacatattccttataccctcctgtgtcatcagcctaaatatgggctaattcacttatttttttaacgtcattattataaaaacaaccattcggcacagtcaaacaaatctgttttaattttacaaaatgagtcttatgatatattggatttttcgtcacatttacacattttgtaaatgtagtagtatgattttcttattattttcgtttccaccgaatgatcttattgtcctagtctatttccctgcaaagatgcctttcagtctgaaaagcaagatggtaagatcaagatatgaagctatgaaaaagtagggatacagatgaccaatccaaaggatccatttaagtacagtttcgacaggcttgaagatgttgccgaccatatcagtgaagttcttcaatgccccattacaatagaagacgttaatcataaactgcttgcatacagcacgcacagcgattgtacagatccggcccggacgtcgacgattatcgggcggagggtgccggaaaaagtcatcaacaaactctggaaagacggaaccattccggcccttttaaaaacggaccagccgatcaaagtgaaagaaatcgacgaggtgggcctgagcaaccgcgtggcgatttccatctggaaaaacaatcaggttctcggatttatttgggcgcttgaaatcaaaaaaaagcttaatgatgaggatctgaagacacttcagctggcagccaaagcggtgcggaacaagcttttgcacctgcagatccgcaaaacgaaaatcgaagagcggggccaggagtttttttggaaaatgctgaccggccatatttatcaggaagccgaaatggccgaagggtttcataagctcgggatggcgctgccgtccgtgttcagcgtcatgatcatccgtttacatgatgagctgactgaaaagacggaacagcagctgcaatatttgcaggaaacgacacagcagattcatgtcatgctggcgactgtcgattcaaatgaattaatcttattagccgcgccgaaaaccgatcagccttttaaagatgtaaagcacttcgcccttcatattcaaaaacagctgaaggaacgatataaaattgaggatgcgtcgattgcggtcggcggtatttacgaatcgatttcttatgtttaccgctcctatcaggaagcgctttccgtattaaaagcgaaagagcggtttgtgagagaaaccaaacaccttttcagcttttcggaactcggcatttatcagtacctggatgtgttggatgaaaaacgcaagcacagcggctatatgaactattccctctcaaagcttgagcagtatgacagggagcaccaagccgatatggtaaaaacgctcgaacattttattgatgccgacagcaacgtcaacaccgccgctaaagcgcttaacatccatgtcaatacattgaattacaggctgaaaagaatcagccagatcgcagaaatcgacttaaaaaatgtgaatgaaaagtttacgatttaccttgatatcaaacttcgcagcatgggttcgtgaaatttcacaaatccgtgtttttttattttctgtttcaaacaaagaattttcgcaaaaatcgcgctacacttgaaacatcacacaaacattgggggaaacagacatgattatcggggttccaaaggaaatcaaaaacaatgaaaatcgagtggctttaacacctggaggcgtttcacagcttatcggaaacggccatcgggttcttgtggaatccggagcgggactcggaagcggctttacaaatgaagattacgtatcagcaggggcggaaattctggaggacagaaagcaagtatgggatgcggaaatggtcatgaaggtaaaagaaccgctggctgaagagtatgcgtatttccgtcaaggtctggtcttattcacttaccttcatttagctgcagagccggaattagctaaagcgcttacagaaaaaggcgtgacagctatcgcgtacgaaacggtaacggacggacgttcccttccgctgcttacgccaatgtccgaagtggccggcagaatggccgcgcaaatcggggctcagtttcttgaaaaaccaaagggcggaaaaggaattttattagccggcgtaccgggtgtatcccgcggaaaagtcacgatcatcggagggggcggcgtcggaacaaatgccgcgaaaatggctgtcggactcggtgccgatgtgacaatgatcgatttgaacgcagaccgactgcgtcagcttgatgatattttcgggcatcagattaaaacattgatgtcaaaccctgtaaatattgcagattccgtcgcggaagcggatcttctgatctgcgccgtgctcatcccgggagccaaagcgccgactctcgttacggaagagatggttaaacaaatgaaaccgggttccgtcattgttgatgttgccatcgatcagggcggcattgtggaaaccgttgatcatattacaacccacgataatccgacttacgaaaaacacggtgtcgttcactacgctgtcgccaatatgccgggcgccgtaccgcgtacgtctacgctcgcattaacgaatgtaaccgttccttacgcgcttcaaatcgccaataaaggcgcggcacaagccattgcagacagccctgcgcttaaagcgggcttaaatacggctaacggacatgtcacgtatgaagcggtagccaaagacttaggctatgactacgtgcctgctgaaaaagcaatgcaaggttcggctgcaaaagcttaatagatatgaagaggacagcctgatcagcgggctgtccttttttctttctcataaaaggaaaaacggccccctgtctcgaatatcaattcatatcccggaagaaaaaggaggattcatatggctgttcagcactatggtgtattaaaaggcactgtgtcagatatgaaaagggaaacagatgatgattctccgcattttcaagtcgaggtgctaggcgagcctgatacgcgctatcgctgtgcgatcaatgtcatgtcaagttcaaaagaatcagaggttctgtatgcggcacgcgatcattttgacgcaagcgcgatcaccctgctgcccaacattccgtatggatataccccaattgatgaaaccagccgtgagctggcgctggattatgtccgcggcggattgtttgatccccggaacatggtgcccctcccgcatgaagtcaccggtccggataatgacttaaatgactttattgagacgtacatgcaaaaagccaaatcagaaaaagccaccgtctatatttacggctctaaattcgggccggagccgggcgctgataagattttcgggttcaagccgacaaacggcatgcataatattcatatgaatcagggaaacccaattgatacacgctggaagaaggataacggaacgtggcacgacggcggtattttaatccagtttgcagaccagtgggccgcggtctttttggcttttctgtctcagtcatggtgcacgaatgaagaaggccacccttatacattttgtgatcatacacagtttaacggctgatgtccgcataaaaagcctgccgaaataacggcaggcttttcttattacattttagcggcttcggcctgtttcaggctttccggcctcatatcacgccagtttgtttcaatatattcgagacaaacggggcgggtttcattcgtgaggcgggtttcccagccgtccggcacatccatataggccggccacagtgagtactggccttcagcattgacgagcacatggtatgagccgtcttcccgttcaaatggatttgtcatatcttctctttcctttctttaccggactgtacgccgtccgtttaatttctctgccagaatcgcgccaatgtcggcaagcgggcccggctggcacatatctttatggcggcagtctaagtcataccgctcgattttccccgtaatatacggtttccaagtatccggctcaatcgggtcaaaccactccggaataatcgttgatctgaagaacagcacatctccgtggaacggtttcggcttgtatgttcctaacagcccgacagaattaatgtacgtgtctttcagattcatcatcactgactcgtccaggctggctaatgcgcttccctcacggcggagaatggtcagcgcggtgtcaaaatcaagcggctgatccccgaggctgtccgggtcgtaccctcccagggcgagcagcgcgatgacggcttcctcgtcatcaggcgcattttttatcggcagaaaatgattcggatacgcgtcaagcatcaccaaaagcgaaacctcttcaccccggctctgtaattgtgtcgccatggcctgaatgacattccctccgagagaccagccgagcagacggtacggccctttcggctgcacggtgcggattttttcaatataatccgccgccatgtcatctaggctttgcggaagcgattctttttttccgatgcctctcgcctgtaagccgtatatcggataatcagcctctaaagaagacatcagcccggcataacaccagctgagaccgccggccggatggacacagaacaacggtgtttcttctcctgccgttctgagcggaagaagaacatcaagcgcgcttgcgcccgttcctgactcaagtctttcagcaaggcttgccaccgtaggagcttcaaataatgttccgatactcagctcggctcccatcgcttcccgaatacggctcattaaatgaaccgcaagcaaagaatggccgcctaaatcaaagaatctgtcatcaataccgacacgcggcaggtgaagcacctctgcgaacagctcacacagcatttcttcctgcggcgttctcggcccccggccggtgacctccgtttggaagtcaggcgcagggagcgcttttcggtcaagctttccattcggtgtcagcggcaattcatccatttggacaaaagctgacggaaccatgtaatccggcaggctttcttcggcaaaccggcgcatgtcccccgtgtccaaggtgctgccggcagatcggacaaggtaggcggccagccgtttatctcccggccggtcttcacggacgactacggcggcatcctcaacatccggatgtttgacgagaaccgcttcgatttctcccaattcaatccggaagccgcggattttaatctggtggtccgccctgcccatataatcaagagaaccgtccgtccgcagacgggctaaatcccccgtccggtacatcctcgttcccggcgggccgtacggatcagccacaaagcgttcggcggtcaggctttgccgccctaagtagccgcgtgccacgcctcctccggccacatacatttcgcccgtgatgcccgggggcacaggctccagccggtcatcaagcacatatacgttcagatcaggaatgccgcagccgatgaggctgtttgctctcagctcggcaatgtttttgtctaattcaaggtaactgacgtgcaccgtcgtttccgtaatgccgtacatattcacgagcaccggctgattgtccgcgtggcggctgtaccaatcctcaagccggctcagctcaagcgcctcgccgccgaagatgatatatctgagtgcgagctgacgccccagctctttgtgttctttttccgcatgcatcagctggtaaaacgctgacggcgtttggttaagcacggtcacccgctctttcacgaggagatgtaaaaacgcttccggcgatctgctgatgtcatgcggcacgacgacgagacgtccgccgtgaagcaacggcccccacatttcccagacagagaaatcgaaagcgtaggagtgaaacatcgtccatacatcatcagaatgaaagtgataccaatgccgcgtcgactcaaacagccggataacattgctgtgcggaatgatgacacctttcggcacacctgttgatcccgacgtgtaaatgacgtaggccgggtgaagcggtgacagcggccgaatccggtcagcgtccgcagggttcgtgacggcatattgccgaagtgtttccttgttctgcgggtcatccaatatgaaggccggcatgccgctttcgatagagagcttacttgcgccttcacggttggtgagcataaatacaggcttggcatcatgtaacataaaagcaatgcggtccgcgggataatcaggatcaagcggcagatacgctgcccccgtcttcaggacggctaacagcccgacaatcatatctaaagaacgcggcagcgccagtgcgacaaactgctccgggccgacgccgcgggcaatcatcatgtgcgcgagctgattggctctttcattcagctctttataagtgagtccgctctcttcaaaaactgccgccgtttcaaccgattttgcggcggcctgtatttcaaacagttcaggcagtgtctgccgaggctgaatatgctgttttgcacgtttaaccggcaaaagcttccggcgctcttcatcagaaagaatggttaagcttccgatcggtttttccggatgtgaggcggcatcttcgagcagaagaagcaggcgtccggcaagtgcttcagccgtttcttttctaaataagtccgtactgaactccagcaggccttcaataccggcaggcgtgccgtcgtcatggcgctgttcagccaattccagcgtcaaatcaaatttggacgatccgacactgctgatttgcaggcttgtttccatctcaggaagactgagtacagggtcaggcgtattttggaatgcgagcatcacttggaacagcggatgtcttgaccgggaacgaaccggattcaattcttccacgagacgttcaaacggcacgtcctgatgttcatatgctgcgagattcatttccctgaccctttcaagaagctcacaaaagctcggatcgccagaggtatcggttctcagtacgagtgtattaatgaacatacccacaaggtctcctaatgcgtcatcactgcggccggctatcggactgccgatcggaatatcggtccctgcaccgagccgggtcagtaacgcggaaagccctgattgaagcaccataaacaggcttacgcgctgatttctggcaagtgagagaagacgggcatgaagctcttggccgatgttgaccggaatgacgccgcccctgtagcttgattcagcgggacgcggaaaatcagacggcagctccagctgatccggtacattttcaagcgttttcttccagaaatccagctggcgcgcaattaagctctcagaatcagacgcgctgcctaaaagctgctgctgccaaagcgcataatccgcatattgaaccgccagcggcgcccattctgctttttcacctgtttgccgggcgatataggctatggataagtcacgcatgagcggattcaaggaccagccgtcacctgcaatgtgatgcaggagaatcatcagcgtatactcgccgtcaccaagatcaaacagctcggctcggacggccggctctttagcgagatcaaaccgatatcgtgccgcagcggcaagcatgtcttggagctcgtttttgtctgcacgtgtcactgtaaacacagggcgggcttcttcagcagataaaatgagctgatgagatgatcccttattttccggaaaaacggtgcgcaggctttcatgacggctgacaacatcgtaaaaggcgtgtttcagcgctgattggtcaagcttgcctgacatgcggacaatcaccggaatgttgtaagtcgggcttggcccttcaagacagtagagaaaccatagacgcagctgcgcaaatgacagcgggatatgctccggccggtcaaacggcttgagcttaggccgcgcactctttgcggtgtcaagctgtgcggcgagcccggcaacggtcggcgtatcaaacagacggccgatgccaagctctgcgcccatcgtctcccggacccggctcatcaggcgtccggctaagagcgaatgtccgcccaattcaaagaacccgtcatcaattccgacccgcgcgagaccgagaacctcggcaaacagatcgcataatatttcttcctgcggcgtccgcggccctctgtcagacaggacagcggaaaaatcaggtgcaggcagagcgctgcgatcgagcttcttattcggtgtcagcggcaattcttccagctgtacaaacgcgcccggcaccatataatccggcaggctttcgcccatatattcacgaagtccgccgatatcaaggggctgatccgcgacagcgtaagccgccagccgcttatctccgggctggtcttcacggacaatgacggcggcctgcgaaatacccggatatttcgacagcactgactcaatttctcctaattctatccggaacccgcggattttaatttggtgatcggctctgctgatataatcaagcgagccgtcctcacgccagcgcacgagatctcccgtccgatacatcctcgcgcccgcgggcccgtacggatcggcaatgaatctttccgctgttaaatcaggacggttataataacctctggcaagcccctcccccgctatataaagctcgcccgcgattcccggcgggacgggctgcaatgcggcgtccagcacatatacccgcgtgttccaaatcggctttccgatcggaggcgcccctgtatggccttttgcaagcggctgtgcggccgaccagattgttgtttcagtcggcccgtacagattcgtcaccgtacagcctgattcaagcagagcatgcataagcgcattcggaagcgcctcacctccgacaagcacctgcagcgcccggagagaatccggttcattggtgactaatgaatgccacaatgtcggcgttgcctgcatgattgaaataccgtatgagtgaatcatgtgcgcaagcgcccgcggttcctgaatcgtctctttacgtgcgatgacgcaccccgccccgcttatgagcggaaggaagagctcaagcccggaaatatcaaacgccgcagtcgtaacggcaagcaggcggtcttgtgcgccaagcgggaacatttcccgcatggataagaggaaattgcttacgctttttaatgtcacgactacgcctttcggtttgcccgttgagcccgatgtataaatgatataagcggggtgcaaaggcgaacattccgcctgagcgggaaagtcagcattttgagcggcaacggtttttaccgtatccgggtcatcgagaatgatcctttttgcatcactgtcttccggcatgcggccggataattccatcgttgtaatcaggcatgcaggctgtgcatctttgagcatgtatgtgatccgctcagaaggaaaatcaggatcaagcggcaggtatgcggctcccgttttcaaaacggccagcatgctcacggccaactcctgtgaccgcggaagcagcaaagcggcaaattgttccggtccgagccccttttcctttagcatgccggcaagctggttcgcgcgcttgttcaattcggcatagctgagctcttcgttttcggtgatgattgccggccggtccggtgtttttacggcctgttcgtaaaacagctccggcagacttttctgcttctcggccttgcgcgtgtcattccagctttccagtacgcggagacgttcagtttcaagcagaaggttgagtgtgccgattttttgtgtctggtctttcacagcggattccaacagaagcaggaatcgtttttgatgattttcaatatcttcggcgctgtacacttccggattcgcatcaaagtccacacgcattccgcttccgtccgctctgtcgtaaacgttaattgacaaatcatcaacgggccctgctgataagttatgaacggtcccccgcgctccggcgaaatcaagcgcgtagtcaaacggcatcacattgacttgcgggccgaacagcctgcgattttctccgagcaatttaaggtcgcggcgcatgtcttcatggcggtatttctgatggcgccggatgtttcggatttcttttgccacttggctgacggcctcatgaaaattcatatccgggcggagagaaagccgtaaaggaagaagattcatgaccatactcggaatattcagtgaaattgagccgatccgccccatcatcggtaaaccgagcacgatatcccctgcgtttgtcatccgatggacatataccgccgctgcggccgtgacggcttcatgccagttcggaatcgcttttacatgctgtaaagccgtttcagaaagataagccgcgcttctccgaaaacgtgttgacgttcgcggcgctctttctgccaaactgacgacatcaggttcatccgcaaatttctccatccaaaattcccgatctttcaggaattgatcagacgcgcggtattcttgctcttcttttaccagatcctccaaagaaccgaaggagcgcccgttatccggacgtccttcccgtattgcggtgtacatttgcgccgtacgccgtgccagcagtgaaaaaccgtagccgtctatcgcaatgtggtgaatgcgctgataccagaaaaagcgttccggtcccgcctgaaataaaatgtcgcggaacaaaggcccggccgccatatcaacgggctcagccaaatctgtctgcatgagtctgagtgcggcctgcttcggatcagcttctgaactcacatctatgacatcgatcgcagcctcaaatggaggattgatgatctgctttggcccgtctgctccctcctcgaagcgggcgtgtaatgacgcggcttccgtcagcacgcgttcgagagcggttttaaatatgttcacatcgatcgcgccgtttatctcaacgtactcgcctgtattgtaaatcggattatcaggatcaagctgctgcgcaaaccagataccggcctgtgcgcctgtcagaggcagctgttgtgtatcatgcattctattctctccctttataaataatctgcgttcggcaagactttttgagatcgggaagaaagaagtctccaccactcttccagcgtcgggttctccgccagttccacaaacgtcacttcagctccgtcacggcgccattgttcgacaagactcatgattctgacggagtcaagacctctgtccagcaggtcttcatgatccggaatatcagacggtgattcttgaagaatcgccgcaatttgttcccgcacccggtcttttgtcaatacggcggaagccttcccttctccttcagaaaccggcgcgccgcccagcagctccagcacttcgtttgtcaaagctgtgtaagcgcagcgctgagacgcatattcgatggccatcttatgtttttctgaagaaaaatcagcaacggcgtctccgataaagaagctttggatatcatccataaatgcttcacaggctgtgacgagacagccgatgtgtgcataaattcccgtaatcatgagctggtctctgccgctttcacgcatgatgtcaaggagattcgtccgtttaaacgcgctgtatctccactttgtgaggacaatgtcctgatcatccggggcaagctccggaatgaccttttcttcataaggcccgctttttagccccggcccccaaaaatccgtcagcagcgcacggtccgccgggtcttggctgcccggctgcgcggtatacaccaccggaatgccgagtgctttgcattgctcttttatttttttgatattctgagacgcctctgtgatcggagcttcacctttcgcaaaagcatcgacgaaataattctgcatgtcatggatcagaagcaccgcgcgtttcggattcagcgtccacgatactttattttcaggcatatctgacgctgtcggcagcgcatatgcgggaatagacggtatagccaatgtaaacacttccttttttaagattgtttgatttcagccggctttactttttgggcgatcgtttcgcgaagatcctttttactgaccttgccgacgccggttttcggaaaagaagcgataaattcaatccggtcggggattttatatgccgccagtccgcgctcacgcaaaaatgctttcagctctcccggtttcggcgcttctcctttcgggatgacgaacacacaggaacgctccccgagaaaatcatccggcattgaaaccatggccgcatcatgaacggcaggatgcgcaagaaggtgattttccacctcctcagcggctattttttcaccgccccgattgatttgatctttcgcacgtccttcgacgatgatatagccgtccgccgtcagtttgacgatatcgccggtctgataaaatccgtcggctgtgaatgatctttcattatgttcaggcgctttataatatccgcgaatcgtgtaagggccgcgtgtaaacaaatgtcccgcttcaccgggggcgacatcccgcccgtcatcgtctaaaacccttacctcatcaaaaggtgacatcggtctgccttgcgtattgacaatgatctcttcaggatcatccagtctcgtataattcaccaatccttccgccattccgaaaacctgctgaagagtgcatccgaaagcgctcttcacacggcgggccgcctcagcgctgaatttggcgcctcccacctgcagcacttgaaggcttgataaatcatcacttcgcgaaccggatgcgtccatccacaccatcgcaagcggcgggacgagcgctgtaatcgttacacgttctttttcaattaacgggaagcagtcatccgggctcggcgtcggtgacagaacaacccggcctccggcatataaagttcccagcacacctggcgagctgagcggataattatgcgctgtcggcagagcggccaaataaacgctgtgttgatccaagccgcatatttccgcgctgatgcgcaaactgtatatgtaatcgtcgtgtgttcgcggaatcagcttggacagccccgtactgcctcctgaaagctgtaaaaaggcgacttccgccgggcttacctcttccagctgaacaggctctctatgcaggctgctcagttcctgaaactcttcagcttcgccggccacaatgacatgcgccaaatcaggaagtttgtctttcacctgtctggcaagcgccctgtaatcaaaacctgaatgcatatcaggaatgatgtatgctttcgcctctgcaaactcgcagaaatacgtaatctcactgcttctatgagaaggcagcgcgaaaacgggcagcgctcccagccggaacagcgcgaaaatcacttcaaaaaactcagcgatattcggcagctgaacgacaacgcggtcttccttttgaattccgagcttatgcagccccgccgctaaacgatctgccctttcatctaattctttgtaggtccaatgtacatctttacacgtcacggcagtttgatttccgtataaagccgcgcgctctttcagcattcctccgaacgtctcacccttccagcagccgtcttttcggtatttgtcagcccattcttccggccatggcgtaaatccagtcagcacgatccgttccctccttttttacaactcatcttggtaaagccccatcgcccggagcatggtgcggaatttcgccgaggtctcgtccaattcatcctgcggctttgatccggcgacaatcccggcacccgcaaagagccggagagaccttgtttccgcttcggcgcagcggagtgcgataatccattctccgtcaccctcagcatcacaccagcccgccattcccgtgtagaaattgcggtcaaacggctcaatatcctgaatcgcttctctcgccgcatccgtcggcgttccgcataccgcgggtgtcggatgcagggcgatggccagctcaagtgatgtcgttgacggatcacgcagctctccctttacctcggtggacaggtgccacatcgcctcagttttaatgagtgacggtttttccggcacatcaagcacacggcagaacggtttaagggcggcggccacggcggccacgactacggcatgttcatgcagatcttttgctgattgcagcagttcttccgctcttctctgatcctcggcgggatctgtgctgcgaggtctggaacctgccagcggattggacagaatcgatgttccgtttttggacagcagcagttcaggacttgcgccgaaaagcgtttttcttgtttctgacgttcccgtcacatccgcagcgaatgtatagccgcgcgggttgtgctgcgccaaatgcttgacggcctgtggaatgtcgatattcttttcagcggtcagatgaagcgtccttgacagcacgattttgctgagcggaccgtccgtaatgttgaatacgccttgttccacaccgctcataaagccctcaggctccggaacgggacggatgtcatatgtattggattgcggcttttctgcggaagattccgcaaacgaaagcgggcctgccgtatggacattcttcggtacaaaaagccgggaagcttttctgccgtcaaaaggaatggcgccggccgcaatcggatgtttgatgccggcttgctttgcctcaagaagcgtctgtctcacgcgttcaggcagtgaatccagctgattttccgcgtctgtatcaggcacttccgcaaacattccttccgcaagcatcgtacttttcggggaagctaaaaagaacgccccgggcttgtaagcgtccagcacctcttttgcagacacttccgccaataaatgttgatttgtcatgtttgtccctccttctcgttacatcaaacgcctaaagtagcgccgccatcaacgcataaatcatgcatcgtaatatggtttgcctgttcagaagccagaaacaaaacggcatttgcaatatcagaaggcttcgccagcttttgaagcggaattcccgttttatatgtatcaagcgaacctctgatgacgtcccgggctccgttctcgtcctgccacagcgcccgctgcatgtcggtttccgttgaacccggagatacgatgttgcagcggatatgatgggccgcaagctccagtccgaggcatttcgtaaacatgacggcagccgcttttgacgccgcataagccgccatggaagcacgcggaacgccggctgcattcgaaccgaccgtaacgatggcgccctttttccgctcaatcatgtaccggcttacagcccgcgacacatgaaatacgccggtcgtattaacagaaaatgtttgatcccaatcttcatcactgagggattgcaccggacccggccgcagcacgcccgcaacgttcgccaatatttcaataggccccatgtcgcgttcaacggcggcgatgatatcattgacagccgcactgtcagatacatctgcggcaaacccctgcgcctgcacgcctttttgccgaagtctgtcagtaagcccgagaagcaggtcttcatttgtatctatagctgccacatttacgccttgttcagcaagggcaagcgctgttgcttctccgatgccttgagcggcgccggtgacaacggccgttttccctttcattcccaatgcgtccatattatcattccccttctatattgataatgattatcattatcaactatgattcaagacaatcatatccaaatcaaaacacgcagtcaattagaaaattagaatcagccgcatttagttcgaagggcctgttttttctcatgcgggagaatacggggtatgcggtcctcccggattcaggcagaaacgcagggccctgctgattaaaacgggcaggacagaaatatggccctctccttcaaactcgctgtattcagcacggactccatcatcttcaaatccggataataaagagtacagcgcctctgcgtgctgcgggattctgcttttatgtgttttttcaatttctcccgcagccagcaatacgctgacttgaagattttccgcagagagccggtctgacaaacgctccgctttttcctgaataaaacgcttgttccagtgaattgacggactcccggcaacataggtctggaacatgtccggcctcgtcaaaagcacttgcagcacaaaaagaccgcccagcgaatggccgaaaatcgtctgcctgcctctgtcgatcggataatcccgctccatcgcgggctttacttcttcttctataaaactcagaaacgcttccgcccctccctgttcgggccatgccgcgccgcgcgggtgcaccggcagttctgattcagaaagcggcatcgtaaaatcactgtgacgttcggcggaaaacggctgatctgtcgggtagccgattccgacaatcaccgccggaacaacgcctgttttttcaggccgtcggctttgcacccgcaaagcttcggccattgtgccgaatacagaattcgcatcgagcaggtatatgacggggaagccggatgcaggcggttcttcctgaggaaaagagacaaagatacgatacgtacggcctccttttgagcgcatttctcttacttctgtgcccggaaccgcgtatcggccggccggcgcgaaaccccgctttatttgttttccgtccattatgtgttcatcccctttgcggcaattgctttatctattcttattgataatgattttcaatatcaaaagacacctcaaataataggttttttgccaaacaaagtcaatggatttttgatataaaaaaagcaccttatttcaataaggtacctaagaactatatagtgataggggcttaatcccatgtaaagcgctcattcttccatggatctcccctcatatggtagccgtttttctcccaaaagccggggtggttttcctttgtgaactgaatgccgcgcagccatttagcgcttttccaaaaataaagatgggggaaaacgcctctgagcggatagccgtgctctggcgttaacggctcgccgttatgcgcatatgccagcagggatgtttcccgcgtaaaatcagaaagcggcaggttggccgtccagccctcttcagcgtgcagaatgacgaaccccgcttctttgtgcactcgcgctttttcagcgatgtctttggcgcgtattcccttccagatattatcaagacgggaccagcccgtgacgcaatgaatatcatttttcacttcggcttcaggaaaggctttgatatcctcaaagcttagcagcataggacggtcaacaagtccgtacacttgcagattccattttgacatatcttcataataaggaacatttccggcgtgaagcacgggaaacttcgttgtgacattttggtttggcggaatccgttccgactgttttgtttgtttcgttttcccgaaaaacatatggctccctccatttagtaaacctgcattaaatctttgttgacaatcaatcacccttcgattacgctaatctggtacaagtgtaagggggaaaaacaaatgaaacaacgcaaccttcgcgcgggcgatatggcgcttatcggcatgtttaccgcactgatggccgtcggcgccaacattacatcaatggctccttttttgcaagttgcgggaattccgttatcgctgcagcctttcttttgtctgttagccgcgatgcttctcggcgccagacgggcagccattgcaatgacggtatacgcattggccggactcgcgggggcgcctgttttcgctcaattctcagcaggctttgcgccgtttatcggaaagagcggcggatttattctcgcttatatcccggcggcatttgcagccggatggctgctggaaaaaacaaaaaaacccggccgcctgcattatgcatgggcctctttgatcggtaccgccgtcatttatatcattggcacgacctatacgtatattgcgctgaaattatggcttcatgctccgatcagctacggaatggcctggttttacatgatatggtttttcataaaagatatcgttttagcactgttattggcatcaatcgcgcctgccgtttacaggtctgttcataaagcgacggggttcagcagaaacccggcgtaagatgttctcagcatacaaaaaggctcccctttccgggagcctttttttacaggacaagtgcggcaatccagccgaatatcacaagtggaatgttatagaaaataaatgtcggtacgcacgtatcccaaatgtggtggtgctgtccgtcggcgctgaggcctgacgtcggcccgagcgtactgtcacttgcaggagaacccgcatcaccgaccgcggcggccgctccgattacggcaatcgtcgccatcggactgaatccgagctgagcgcacagcgggacaaatatggtcgtaatgacgggtacggttgcaaatgatgatccgattcccatcgtgattaataaaccgaccaccagcatcaggagcgcgcctaatgattggctgtggccgataaagcctgttgatgctttgaccaaggaagccacatcacccgttttattcaatacatttgaaaaaccggccgcaacaagcatgacaaacccgataaaagccatcagaatcatgccgtccgtgatcagcttatccgcttcattgcgcttcatgactccgctgataaacagcgtaaacaagccggcaagcgcgcccatgatcataccttccactccgagcacttgtgacagatagagctgaacggcaagcgacacggcaatggagatcaaggcgatggcaatgctttttttcgtataaggagaagacgatagtccggcaatctccttcgtctcatatttcttcggtttccggaagacgatgacggctaaaattaaaccgactaccatcccggccgtcggaatgattaaagcataagggatatcactgagcggcacctttaaaccggctgccgccatattatctctcagcatcccctggaaaatctgtccgaatccgacaggcagaacgatataaggcgcagtcagtccgaatgtcatcacacacgcgatcagtctgcggtctatttcaagttcgttaaatatttttaaaagcggcggaatcaatacaggaataaacgcaatgtgaacgggcaccacgttttgcgagaaacaggatatgattaaaataatcagtacgattaacacttttgacagtgcttttttccgcgaatcttccttttttccgattagtttgacagacgcttccaccattgcatcgggaagccccgtctttgtcagcgccgcggcaaatgctccgagcagcgcgtagctgaccgcgacggtggcatttccgccgagaccgtccgtaaaagccttcaccgtctctcctaggcctaagccgccggtcagcccgccggcaagcgcgccgatcattaaagctataataatattgacacgcagcaggcttaagacgagcataagcaatactgcgacaacaacagcattcattgatgagtccctccaaaaatcctttagtttgctaatgtagtagataattaaagttaccatatattctgcgctttagtcaactaaagattttggaaatcaaaaaacccgctgcatcaaggcagcgggatgctgttatctttcgggcgtaaagcgctcagtcaaaacagccaacgtccttgccatgacgcctgttgcgccggcagggccgaagcatgtcgctttattcgccgttgcggttcccgcaatatcgagatgaacccacggcgtgttttccgcgaattcaccaatgaatgcccccgccataatcgcgtggccttctcttcccggagaattgttcaaatcagccatctgactgtttctcacccgttttttatccttttctgtaatcggaagctgccagatcggctcgccggattctttcgccgattccgcaacctgttcataaaacgcggcgtgattggtcatggcgcccgtcatttcgttccctaaggcgacaatgacaccgcccgttaacgttgcgacgtctacaaggacagaggctccgtgctgcttggcgtatgtgatgccgtcggcaagcacgagacgcccttccgcatcggtgttcaggatctcaatggtttttccgctgagcgaaacgatgacatcatccggcttcatagcatcagacgaaatcatgttgtccgtagacggtatgacggcgagcacgttttgttcaggccgcagttcgccgataatttccattgcccctaataccgaggcggcccctcccatatcgcttttcatgccgacgatgccggttttcggcttaattgaatatccgcccgtatcaaaggtaattcctttaccgaccaggccgataacgtcttcccactgatctttgccctgatacttcagaacgatcattttcggcggttcggatgagcccttgttaacagcaagcagcccgcccatgccgagctcttccatttcatctttttctaaaatttcacactcgaaatcgtattttgccgcaagctcggcggcatatgacgccaaatcagtggccgtcagcatattacccggcatattcacaagcgtgcgggctgaattcgtcccttggccgtatgccgctccgacgttcaggccggcctgcacttccctcaggtcttcttcggtcacggcgcagactgatttcagttcctgatccggctcatttgatttatgtttataatcctgcacttcgtaaaccgcaagcagacagctttctgaaagcgcatgagcggcatcggcggcaggcacttccccggagacgaatgtatcgagcaaaacggatacttcctgttttttatcttgatgaatctgctgaaatactcgtgcaaagcattctttcgtatcttcaaacgaataatccgcttctcttcccaggccgataaaataaatacgtttcataccggtcgcagccggagggtatacttttgatacacgattgcgtttggcggacacatcaccatcctttaacagctgggtcagatgaccgtccaatttatcatccaattccttcgtaaatccgttcagcgtgcttttttgaaaaagaccgatgaccagtgtttcgggatgccgcagttgatcagatgcataaaacatgagtacacactccttatgtgggtatttgttatgtaaagtggtataatgaaaaaacatttttcattgattttattttaccaaactaagggcgttttctgcagtttttcgatacgatcggaatcagcagatacagaaaggatgttgcatatggatgtacttatgaattttcctttactggcgagttttgccgccattatttttgcccaagttgtaaaagtgcctattcaatttatcgtatcaaaaaaacttgactggtctcttgtgacgagcaccggcggcatgccgagctcccattccgctgccgtcaccgcgctgtcaaccggagtcgctttggaacagggactggattcgcccctgtttgcagtcgccgcgattttcgccgtcattacgatgttcgacgctacaggtgtcaggcggcatgcgggtgaacaggcgacggtcattaatagactggtcatcgactttaatcggtttgtcagcgaagcgaaggactttcagaaagcggaagagaaggaaaaacagaagaaactgaaagaactgctcggccatcagccgattgaagtcttcttcggcggcgtcaccggtattgtgctgacattgattttagattatttctttatgtaaaaaacgcttcagcggatgctgaagcgtttttattcttttaccgttttgtattgatttctgaacacttgcatcgacttggtttcgttcagctttacaagttcgtcctcggtcactgtgccgttcccttttttaatcatgtagacctcaagtgtttttttgccccaattgttatagacgtccttgacggtgtcaaagtagaggtcaaggcggctgcctttaatttttgagccggtatcggcgacaaccccgtaaccgtaattcggtataaacagaatcgtcccgatcgggaaaacagacggatcggccgcaacagttgaatataaatcgcgtttgaccttcacgcctgaatatgtaattccgtactgcggatgacccggagattttccggtagattccgctccggcggtataaccggtggccgtcaccttttgtgacggatagcgttcccagtcaaaagcttcttccagcggtttcatcctgcctgatgccttcttttccggctgattctgtaaggattgaaacggagtgccgatgtttttcaaaacggcgccgcgatgttccgtcatccaatttgtcagatcctttgcttcaacaccggttatggaaaagtatgtcgcatggcatgcgcccaaaaagagcacgatcatgaatacgcgtctgattatcgtcaatctgaaatcactctcctccgagtcattgttcccaactcggtgaggtgctatacaaaaagcgccgcggcacaaaaaaagctttctcaaataagaaagcggcttaaaacatttgatatcctctttttctgagcgcctttatggcaatgcctgacgtgatggctcccgccagtccgcccgccaaaatcacgacatccgcaaccgctaatgacatgatacgctgaaacaggctttgaaaggattcccccggcgcctgcacgtaactgatcatctttttattgctgataatgaaaaggcatacaatcggatagacaacagccataatccacgacattctaagcagcatgttcaacagaaagcctatgccgaaaaacagtacaaaaaatagtacgattgagatcaggacaaccggcaaactaatcacaaacatccaccccctacagcactttcagtgtacctcgggggcggtaaaaaagtcaacgtctggaaaaatcatcgtctctctttgccgcttccctggcaggagggacatgtttcggagccgccaagaagcaattgaaaataccctttacctgagcagaacggacacgccgccgtgctttttgctgtcgttttcatgcggatcaccctttttcttaattttctgataatatatcatatttacttgtcaagcaccaagtcagaatatgtaacaaaataactcatgtaagcgaaaacatttatttttttcttttacattcttttgatagcgctcttttttaaaagaagagaaaacccgcggctgcgggttttcagaagaatttaaacttcccttttttcagcgtcaggcccagcccgccgatcataaagagcgagcggttgtcaatgacctttttcataaaggacgccggcgtgcctttgagcttcctgccgtatacgactccgacagcgttatgctcaccgagggaggcaacggttcctttaatgtcaggcttgaactcttcaagctggcctcctttaatcaaaccgcccagatttttggcgaccgtttctccttgctgcatcgcgatctgagcagtcggcgggtacggccgttccgtctcttcattgataaagagcgagctgtcgccgagtataaaaacgtcatcatgtcccggcgcccgaagatcagggttgaccttgacacggccgcgcatattttcaaaacccgcttcctccacgatcggatgcccgcgcacgcccgccgcccagacaacggtctgcgatttgatttcttccggctcttcatctttcttgccgactgtgacaccgtctgcgcggcattcttgaaccgcggtgccgattttaaattcaacgcctttgctctcaaggtattgaacggcgtaatcgacaagctccggatcaaatcccggcaaaaccgtcggggcggcctcgacacagacgatccggacgagactttcatctatatcataatatctgcataactccggcttgcggttcgcaagctcaccgagaaattcaattcccgtaaagcccgctccgccgacaacgatggttaagcggtcagggcgtttttcggcctccgtattgtatgtcgcaaattggagctcaatatggtctttcagctggcgcgacgtattaatattcgcgatcggaaaagcgaattcttttaagcctttaatcccgaatgtttcagggacggcgccaagcccgatgacaagataatcataagggatgtccccttgtgaaagcgtcacctttttattttgcacatctatcgcttttacggtatcctgcacaaatttgacccgtgattcattgattacatcttttatttgatatctgcagcggtcatgatgcagcgttcctgcgctcgcttcatgcatccatgtcgtttcataatgataattgtgtttattgaccaaagtaatgtcagcgtcatttgccccgatatgcttcggaagccttgttactgtcattaatccaccataacctgcacctaaaaccacgattttgggtttattcaatgccatcacatccaccttcttttttttgctgttagacgcataatcaaatcaacatttgtattagcttcagcctattggcgggattttatgaaatgaaatataaaattttttagaaaaccgcacatgtctgcatatcaccatactatccggaagaatcagaaaacattcaggaaaaaacagattggaatttgtccccatattagcggcggccgcaatttttttcaagaatgaagcggcctggcggttttcggcactcgtcatccttttaaattgtatgttataattaataacaattttcaattaggaggcaatttggtatgcaagaggattcaaaggtttatgatattacggtcatcggcggcggcccggtcggcctgtttaccgctttttacgggggaatgagacaggcgagcgtcaaaatcatcgagagcctgcctcagcttggcggccagctcagcgcgctgtatcctgaaaaatatatttatgatgtagccggatttccgaaaatccgcgcccaagaacttgtgaacaacttaaaagagcaaatggcaaagttcgatcagaccatctgcttagagcaggccgttgaatctgttgaaaaacaggcggacggtgtgtttaagcttgtcacgaattcagaaacgcattattcaaaaacggttattatcaccgcgggaaacggcgcatttaagccgagaaagcttgaactggaatcagcggaacaatatgagggcaaaaacctgcattacttcattgacgacctcaatcaattcgcaggcagacgcgttgccgttctgggcggcggcgattccgcggttgactgggcgctcatgcttgagccgatcgcgaaagaagtcagcatcatccaccgccgtgataaattccgcgcgcatgagcacagtgtcgaaaacctgcataattctaaagtcaacgtgctgacaccgtttgttcccgctgaacttgtcggtgaagatcggatcgaacagctcgttctcgaagaagtgaaaggcgaccgtaaagaaatcatcgaaattgatgacctgatcgtaaactacggctttgtttcttctctcggcccgattaaaaactggggacttgacatcgagaaaaattccatcgtcgtcaaaagcacgatggaaacgaatattgaaggcttctttgccgccggagatatctgcacatatgaaggcaaagtcaagctgatcgccagcggtttcggcgaagctccgacagccgtgaacaacgcgaaggcttacatggacccgaaagcgcgcgtccagcctctgcattctacaagcatgtttgaaaaataatataaaaaagagtctgtgtcataccggcacagactcttttttatttaaacatccaaatataattcatgacggttccgacaacgagcgcaatgacaagcgccgacacgacccaaatcgtgcctaaaataatccggtcctgaattttctgggcattcgggctgtgcccgggctgtttttgttccacaccggcccctcccttctttgcaaatctatctatcgtaacaaatgtcttaccacacccaatactactatgataaccaaactgcaaatggatgacaagctgaccgcatatgaggcagcatgaaatcatttgacattcctgacaaaacaaagtacattataaaaagacgaacattttaattttatttaattctattattcgcttttaggggtgttatatatggaaaatgtatttgattacgaagatattcagctgattcctgcaaaatgcattgtggacagccgatctgaatgtgatacatcagttacattgggcggacacacgtttaaacttccggtcgtgccggccaacatgcagacgattatagatgaaaacatcgcggcctggctcgcggaaaacgggtatttttatatcatgcaccgcttcgagccggaaaaacgcctggcttttgtccgggatatgaaagtgcgcggactgatttcttccatcagtgtcggcgtgaaggaaaatgattatgaattcatccgggagctgaaagcacaggagcttgtgccggattatattaccattgatatcgcgcacggccattccaatgccgtgatcagcatgattcaatttattaaagaacatgtcccggaaagctttgtcatcgcagggaatgtcgggacgcctgaagccgtaagggagctggaacgcgcgggcgctgacgcgacaaaagtgggaatcggccccgggaaagtctgcatcaccaaaattaaaaccggcttcggaaccggcggatggcaattagccgcgcttcgctggtgcgcgaaagcggcgagcaaaccgatcattgctgacggcggcatccgcacgcacggcgatattgcgaaatccatccgattcggcgcatccatggtcatgatcggatcattattcgccggccacgaagaatcaccgggacaaacgatcgaaatcgatggaaagctgtacaaagaatatttcggctccgcttctgaatttcaaaaaggcgaaaagaaaaacgtcgaaggcaaaaaaatgcatgtcgaacataaagggtctttacaggacacgctggttgaaatggagcaggatctgcaatcttccatctcttacgccggcggcaatacactcgaagccatccgcaatgtcgactacgtgatcgtaaaaaactctattttcaacggcgacagattttaacacacagcagagccgcaaaaaataaaaaaatgacattcaatatgaatgtcatttttttcattaaataccgaaataaagagccgcactggccaacagattaatcacaaaaataaacaaaaagatgtaacgaatgaatttattttgcaccggagcaaatataaagagatatagtcctgccaccccaaaagtaagaacaggaaacagccactcaaaggataaagaaatgatataaccgataatcataacaatcggcacaccgattaatgataatttacttctcatatgatttctgccccttttacttaaaaattggtgtgatgtaagcttcaataatggcagcggcgatcagcagacaaataattatgagcaccaatattccaatatgcctgaacattgaagccattatctttttttccttagaaaaacacagcctgatgaccaattcaacgcccttaaaaccaatggcgccacttaataataacgcgggaacttcaaatataccatgaggaattagcagtaaaaaaatctgataaaaaggaaccccgctatgcagattttctataatagagccgcttaaaataaacccgttggtgaataaataaaagattgaggtcaacccaaaggtaaaaaaacccgcggctaaaaacagacaagcgattgcattgtttttcagcagttcaaccgcgcctgacgagccgttgtaagacgcggttgaaacaaagtgatcggaaaaaaacgcagcgatcacaccgcctgaaaaaaacagcaatgacgcggttaacggaatgacggacgtcctgattgccggcaacatgcggttcatcatgtatagatactctcagccaattcttcaatctcttctaatgaatgctcggatgactgatactccgccgcaaaaacgccttcatgtataataccgatcgtatcacacagcgaatgcgccagctccaacaggtgggtcgataacaggaccgtatgtccctgcttgacgtactcctttaataacgtccgtatcgttttaccgctgattaaatcaatgcccgtcagcggttcgtcaagaattaatatctttggctgatgaatgagcgcggccgcaattgataatttttgtttcattccatgtgaatatgttttaatcagctgatttccgtcttgagcaagcttcagcgtctctaacatattctttatatactcatttgtccgctgagacggtacttcaaacatctccgctgtaaaacgcaggtattcgactcccgttaagtaatcatataaaaaggcatggtcgggcacaaaaccgatatcagccgatatttgccccccctcttctgaatccagttccttaccgtcaatcatgacgctgcctgaagtcggtttaagcaggcccgaaatgattttcaaagtcgttgttttcccgactccattagtccccagcaaagcataaattgagcctttttttacctcaaacgaaatatctttcaatacctgtttttcactatagtttttttgtatattcactaatttaatcattgttcgcaaacctttccgccatattgattctgcgaagaaacagaaacatgactccatagtttaatagtgtgaacaggacaaaaatacctgatgcagaatgaataagcatcgtttcaagttccggctttttatagataaaatacgacgtgatcgcagcgatttgaagcgacacaatgaaaatgaaagatccgtataagttgttatacgtctttgctttccccgcttctccaatttcgtacatatgctcccagtttttcttaggatacagggcggtgcttgaaatctggacaagactgtataaaaaacccgaacataaaaacacaataaacaagtaaatcgtcagcgcagcggaagacggaaaaaacaccgtaatcaaaatggtgatgatgaacgaatagataagagcggcgagattataaatacatactttcggaaacaccagctgccacgcatgtttgatatttcggtgaaacagatgctgattttttatttctccgtcaactgataatactgttttgagcgcatctccgacgagctgatacgaaaagttcgcaatgataaccgccgcagacacgatggcggctgccgaatacccgataaaatgatgcgatagaagcggaatacaaaaacctaaaaacagcatgaacaaatacagcatactgccgaagttcctgataaaaaacccgtcaattctcgataaaaacagcagatccttttgaaaaacggcatgaaatattttgttatttctatataatttcagctttggcgcaaattctgcgtttgtcaaaaacatataaggaataaggtccattttcttcagcgtggccgaccacagtttaaacatccccgccgttaaaaggacggcggccgcaaacgccgcagcgaaaacgagcacggaatgtgagcggaatgctaaccatacatacggcgtattcatgaggatgttccggaaagccggtgactccgtaaagcttgaaatatcctttgcggtatactccccaaacacgagaagataaacggcatacccgactgcaagcggaaccagcaggctgacgctgaataaaatgcctttcatgattttcaagtaaaacaatttgctccacatatttgtaagaagataaacaacataagaaaacagcatagataaaaataaattgagaagaaaataaacgaagcccaagaaaaatacgatgaccgccgcagacccggtcatgcctgcgcttgataaaaacaaaaagaccggaaaaacaaaaagataccatacgaaaatggtttttttgatcgcctggccggcaaaaacagaaaacagctgtaaaaaacgaaccttttttaattgatgaatgaccttgcgcgtatccagcagaaaggcattgtggtgttctttaaagaagccggcagcccaaaacagctgctcaagtgaaacggcgattaaaacaaattgcccccatgcgctgaggggcagctgaatcagttttgtcccgaatacaacaccgcatcccaggaaaacgagatataaacataacagagaaataataatggcagacagcagtttgctgttgagttgaggaatgccccaatcttcctttctttttcgaaacgatgacagggtattatatttgataagagccgcaatttgtttgactatcatactttcaatccttacatatgtatttgggagagaggctctttttgcagcttgtacaaaaagagcaattatttattgatcgattttaccaagcagctgcgtattttttgccgtatttcttaatcattgtttttgctgttgcaacgattgcataagaaatcgcgcctgcgcctgtaacgataccgataagagaaatgatagaagcaattgttgatgccgcatcaataatatcaattgcttttttagctgctgctgtagagatgccgagagtagaagctaattcagcattggctgagaatgcatgagccgccgccacgtttaattcagttcccgttaataatagtgcataaaccaatgttgctgcagcaagagccgcgccaaacaaaatgaaagactttttattagattttactaagttcatcataacatctccctactctgtttttttaatttataataaaattcagcttaattgactctctcccgagctaaattttatccgccataaaatagtttaagaaaatagtaaagagttttagtaaaacaaaacatccagtcaaaatgattctcttgcctttactgagatcggtcagttttcccgcagcagcataaagagccgcgattgatatgagcagaaatggatccagcagctgcagactcaagctggtgccgccggcagaatatataagcgaggaatcagccgttaagtagttaacaactgaaagaatcaacattttaaatgccgagattaaagaagtcagcgtatatagaagcaaatatatttttttcggtttttttgtaccgagaataaaagcggcaacgaataacagaaatccgcctatcagaatttccacaaaagttgtgaagatcataaacccttgcagaaacatgacaatcgtacgaacacttttctccccgatatcgtaggtattttctccgacggaagaataatacgactgcagaactttatctgaaatactgaattggaagagtaatgaacagatcaaaatgatgaaaaaagaacttaaaaatatttttttattgctcaattgacccatcatattatcatccttttcttacaaaataaattaactattctatacttttacaatttagtttaatcctatcaaaaaatcaatatcctttcgaaaaatatgactttagaacgtgttaacaaagagcacatctttcagagtttttggtgctatctaccctttatttttttttgaatttgcaaatagtatgatttagacaattgatttgaagttttaggaagaatctgtcgaaagagacgcaggatataaaaaaggagcatatcgtcatgtatcctccggatgtatgatcgccagcacctgatgatcttcccattttccaattatttttacattttttctcgcaatgccttctttatgaaagccagctttttcgagcacccggattgacgccttattgtgcggcatgactccggcttctatccgatgcagtttcagctcgttgaatgcataatcgactgccagcttgacagccttcgtcgcatagcctttcccgttatatttgccatctaaaaaataaccgataaaagcgctttggagggaaccctgaaccacctgaaaaaggctgatcgtgccaatcagggtctgatcctgaagaaaaatgccgaagctgtattcagtatcattttccgcattcttcagtgattattcaattcgttttttccggccttccagcgtataaaaatcctcttgtctcgacatggcaaaccgttcaaaaaacatgcggttttccgtctgcaaaaccagttcctgctctgcatcattcaagcggagcggcctgatatcaacgctgtttccttcctgcatatgcatcgccgtccttttgttttgatcagaaacgtttttttaattgcctctcacccatatgatacggtacgctttatcgcatcaagaaaattccaagaccttacgttcacctttcctttcgtgacctatgtctgatgtgagtaaccgaaacggaagcacaaggttcttttgttgacttaaaccgtgctttaagccgtatcatcatattgtgacaaggaaagaatagttttggcgggtttcccgatgatctaaaaatcaattttacagaatcactgctgtcttatttcatgcctatttgcgggatgaatatattgattggattaaagctgaaatgttgacaaagaaatgtaaaaacaatcggaaaagaggagttaatatgaaactgacgggaaatacaatactgattacaggcggaaatgccggaataggattggctttcgcagaacggtttttaaaagcgggaaataaagtcatcgtgaccggacggcgtgagcacgctcttcaaaaagcaaaggaaacattcccggatcttattacatatgtcagtgatttgagcattccatctgaacgtatatcactgtttgattgggtgaaaaaaaattatccggaagtgaatgtgttagtaaacaacgcggggattcaacaacgttttcatgtgctgaaagcggatgcgaaggacaattgggactatttcaataaagaaatcacaacgaacattgaagctcccttccacctgtctatgctgttcgctccgttttttgccggaaaagaagatgcggctttcattaacgtctcttcgggattggcttttacaccgcttgccattgcaccgatctattcagcaacgaaagcggcgcttcattcatttacaatgagtctgagacatcagctttctgattcatctgtagaagtgattgaagttgcgcctccggcggtgaatacagatttaggcggagcagggctgcatactcaaggagaaccgctggatgaattcgctgatgggatttttaaaggactgaaagagggcaaacaagaaatcggatatggttcttcagaagaacggctgcgcatgtcacgggataaagccgatgaacataccgctaatatgtacaatgcgatgaaacatacaattgaataacctctttgaaaaaggaaaacccgcttctgttgagcgggttttccttttattaaacagataaacgcctttcttaacaatggtgcaaacgccaccgaaagaaagacgtcatattttttcatcctaagaatggcgggttgacccttagcactcttccggcgtaccggcgtttttggccgtgcggaaagatgaaccgcagccgcaggaagcgatggcattcgggttgtcaatggtgaaaccgccgcccatcatggactgtttgaagtcaatgatcgtgccggtcataatatcaaggctttcgctgtcgaccaaaacggtgattccgtgctgttcaaacatgctgtctttttcgcctttttcgtgctcaaatcccattccgtaagacaggccgctgcagccgccgccttttacgcccacacggagaaacgcgttttcttcttcatgctctttcatcatatcttttatatgcaaagccgctgcttcagtgatggttactggaacactcataggtagacctcctttttttaaaaacggatgctgatatctattataaaccttgaggagagtatttctcaaacgagctgtttacaaataatagacgccgctgcatacggtttcggcgggtcccgtcatcagtacgtgcccgttgtcctgccaattaatcacaaggtcgcctcccgctaaatgaacggtgatatcccggtttcgttcggaaacaccgttcaatacggatgcgacagccgccgcacaggcgcctgttccgcaagcctgtgtaatgccggagccgcgttcccatacgcggaaatgaagttcatcggcgctgacggtttccacaaattcgacattgacgccttccggaaatctcgggtctttttcaatgacgggaccgagcgttgtaagaggcgcttgattaatatccgcaaccggaaaaacaatatgggggtttcccattgatacggctgttccggaaagctccgtttctccaaaaacaaaggtttcatcgatcgtccgttcatcttcattgccgagcatcggcagctcttttttggtgaggcgcggttcgcccatatcgacggcgacttcacacacaatcccgttgtcctctgtaatgtctgctttcactagacctgaaagcgtctcaatgaaaaaggacgtttcttctgtcagcttatgttcgtatgcgtactttgccacacagcgaaggccgttgccgcaattttccccttctgagccgtcattattaaaaatccgcattttgacgggcgctttttctgacggacagatgaggatcattccgtcagagccgatgcccgtgtgaatgctggacactttaacggcaatctcagccagccgttcttccggcagctgttcttcaaattgatttacatatatataactgtttccaagaccgtgcatcttggtaaaacggaatgaattcatatcggcctccaactttttttcttttacttagtataaaagctcttctgctaggacacaatacaaatatcccccgtttttcatacataaaagctccctgcatatgcagggagcttttatcgtttactaaataaacatgccggcaattgccgcgctgagaaggtttgcgagtgttcccgcaataaccgctcttaatccgaggcgcgcaatgtccgaacggcggcttggggccaaaccgcccagtgtgccgagcataatcgcaatcgaagagaagttggcaaatccgcacagcgcaaagctgataatcgtagacgtttttttagaaaagtccgcaatatgcggaccgaagtttgaataagcgacaaactcattcagcacaagtttctgtccgatatagcttcccgctccgagcgcttcatgccaaggaacgccgattacaaatgcgatcggtgaaaacacgtaaccgagaatggattctaatgtaatatgtttgaaaccgaaccagccgccgattccgccgagaattccgttcactacggcgatgagcgcgacaaacgcaagcagcatggcgccgacatttagagcaatctgaaggccagtggacgcgccttttgccgctgcatcaatcacattagcggcgccttcgccttcttcgtccatattaaaatcgccttttatcgtctgcgttttttccgtttcaggtattaaaatttttccgaacacgagaccggcgggagccgccataaagctggccgccagcaagtattcgatcggaatgcctaacagggcgtaaccgaaaagcgtcgaacccgctacagccgaaaggccgctcgtcataatcgtaaacagctcggaacgggtcaatcccgcaatcagcggtttaatggcaagcggtgattcagactgtccgacaaaaatgttcgcagccgccgcaagcgattccgttctgcttgtcccaagaagttttgacagtccgcctccgatgacgcgaaagatgagctgcatgattttcaagtgatacaaaacggcaatcagcgctgagaaaaagataatgaccggcagaacgctcagcgcaaaagccgggctgctgcccacttttaacagcgggccaaaaataaagctgatgccttcgttcgcataatcaatgagaagctgcacacggcttgagaaccataaaaatacggcccgtccggcgtcccactttaatacgatgaatccgaaggccatttgtaaacataaaccgacaatgacggttcgcaggttaattttgcttttcttctctgataacaaaaaagcaatggctaatatagcaactgccccgagcagcccccaaacgatattcaatgaatccacctctaaaattttatttaaaaaaagtctttattaagataacaatatttatttttgctgtctacaaattttttattttgccaaaacccggggcgcaataaaaaagagaccccgttcggagcctctgattaaaacatcggattttcttctatgaatgtatatatgttgtcaaccagttcagcaggcgtgcctcccgtgaccacttcgccgttgaccagggcgaacagggactccatgcatttcccgcaatagcttaaacagccgtattcaagcacgtccaagttcggatccttctctaagatctcaagtgcttcctgggaaccgcgcgctaaattgctgacacagaattcaatcatcggattcatgcggtttcacctcacatatgtaccttatcctaacggaatttcctctattcgtcaaagatccggtttcacgctcaatgttatcgtaacatattaattcaggttaaaggttttactattacgtgttttctggtcaatttgtaggttattttaaaactattattgtggttttagatcaaattcgatataattctagatgttattttacatagttcgttattttgtaacaacattgactaccatatttttcgggcaaaaggggaatcattatgaaaaaattggtcttgatcggcgggggttacggaaacatgcgggtgctgcaccgcttactgccgaaccagcttccgtcagatatatccatcacgctgattgacagaaacccgtatcactgcttaaaaacagaatattatgcgctcgccgccggcacgatttctgatcatcatatcagggtgtcttttcctgagcatccgaatctggatgttcaatacggtgaggtggcttccgtcgacacgaaaaacaaacaggttctgtttcatgaccgcgaaccgatttcttacgatgacgcggtgatcggactgggctgcgaggataagtatcataacgtgcccggcgcgccggaacatacttacagcattcagaccattgatcagtcacgcgaagcctatcaaaagctgaacaacctcggcgccaatgcatctgtcgctatcgtcggagcgggattaagcggcgtggagcttgccagtgaattaagagagagccgtgacgatctgaagattatgttatttgaccggggcgacctgattttatcaagctttccgaaaagactcagcaagtatgttcagaaatggtttgaagaacacggcgtcaccattatcaataatgcgaatattacaaaagtggaagacgggatcgtttataatcatgatgaaggaatagcggccgatgccatcgtgtggacggcgggaattcagccgaataaagccgtcagagaactggacgctgaaaaagatccgcagggccgcatcgttttaacaccgcatcacaaccttccgggcgatgagcatgtttacgtcgtcggtgattgcgcgagcctgccgcatgcgccgagcgcccagctggctgaagcacaggcggaacaaattgtgcagatcctcctgaaacgctggaacaatgaagagctgccggaaacaatgccgcaatttaagctgaaaggcgttctcggttcactcggaaaaaaagcgggcttcggtcttgtcaacgaccgtccgctcatcgggcgtgtgccccgtttattaaaatcaggccttttatggatgtacaagcatcataacggctgataagaaaaaagccgctgattgcgatcagcggccatttttaagagcccgcaacatagccgcgcttttccatttcttcatatatatcttttaaatgcggattcccttcccccacaatgacatcctccaccagcacgagcggatagaaaaattcatcgtttctgatgcgctccgcaagttcttctgtctccttttgctgaggcggtgcgtcaatatcaatataccgcatatgaaaaggctgttccggatatttccgttgcagcgccgcctccagccattcaaacgtatctttggcgctcggcatattcacgcagcttgcgcaaagcgtttcagcgccgtaaacactgagcgtaaccggcttaatcatgtatatcatcccctttacaccagtatacaaaggacggggcagcttttgtataaaaaacggtttttatgttcaagtttaaatatgctataatggggaaagcagctttgcaaaccaaacattagatttttaccgttactgtgaatataatggttttatgtatatgaaaggagcgaatctcatgactgaggttgaaatgaaagagcaagtacaggaagtattggataaattacgtccgtttctgcttcgtgacggcggtgactgtgagcttgttgacgtagacgaaggcattgtaaagcttcgcctccttggcgcatgcggcagctgcccaagttcaacgattacgctgaaagccggaatcgaacgcgcccttcttgaagaagtaccgggtgtcgttgaagtagaacaagtattttaatcataaaaccaggctgcatgacagcctggttttttattttttacaaatagtcatcaaaccatgaacaaatataacggatgcgtttcatccgctgttccggatggccgcttctcgacagctcatgcgtggctttcggaaaccggatgaacgacgtcgttttgttcagtttcttcaatgcggtaaaaagctgctccgcctgctctatcggacagcggtcatctcgttcaccgtgcagaatcaaaagcggcgtcgaaacgcgggacgcatattttacaggagaacgatcccaaagcttatccgcttcctcaaacaaatcatgcccgagctgccagtcggtaaaaaagaagccgatatcgctgacaccgtggaagctgaaccaatttgaaatggagcgctgcgtgacggctgctttaaaacggccggtctgcccgacaatccaatttgtcataaaccctccgtagcttccgcccgtcacaccgagacggccgctgtcaataaacggatacgcctgaacggcttcatccaccgcctgcatgacatcacggtaatctccgcctccgtaatcacccctgacacgattgacaaaatcctgcccgtagccgtggcttcctctcgggttgacatacacgacagcatatccttgtgcggccagcacttggaattcgtgaaaatacgtatggccgtacatcatgtgaggcccgccgtgtatgtatagaatgagcggataagtttgatcctcttcaaaaacggcgggctttaaaaaccagccgtttaccgtcagcccgtcctttgtttcatattgcagcttttccggcacggatatgatgcgctcctcaataaaccgatcattgtcggatgtcaattgcttctcttccccatcttcgagcgaaatgctgtaaagctcggaaggctgtgcgggtttggcaatgacagcgatacagcttttctgatcaggatgaaaagcaaaaccgttcacatactcttcttctaatcggatcggatatacgaggccgtcaatcgagatataataaataccggtgcttccctgctcgctcccgagaacgtaaaaaccctgcccgtcgtttgtccataccggccggggcgtcactcctcctatgattgaatccgcaatcagcgcatcgctcaaatgaacatccagcatgtcggtcaggcaggacagccgctcagttttcacgtcgtacagccacgctttttctaaagtcgcattgcgaaattcattttcatggccaagcatcgcgatataagaaccgtccggtgaaaacacgcaggaaccgaaagaaccgcggtgcggcgtaatctgcttcaggcttccatccgccagattcatcagatagacatcgctcggctttccggcgtcacccggctcgcataaattggcggtaaacgcaagctgcctgccatccggtgaaaaggccgcgccataatgatccgcttcatgatccgtcagctgccgaatctcccccgtttcaagatgaatcagcacaagctgggcccagcttccgttcagcaggcctttcccgtcacgtttatatgttaatgactgaatgtcaaccggctcatactcgtcatgcttctttttttctttctcatcggcgcgctccgctgatgtcagactgacggtcacaagcacggatctgccgtcgggcgcccatatcggatctgatacgccccaaggaatctcggccgcctgctccgcctctcctccggcagcgtcgatgatgtacagctgtgggatgccgttctccctgtcagaaacaaaggcgaggcgccgtccgtcaggtgaccaccgcggacttgtatttctgttgtccccgaaagtccacgggtttgagatgccggattctgtgtcatataccataatggctgaggaataggaatcacgcttatgattgactgttgtccggacgtaagcggctcttctgccgtcaggggcatattgcgggtctgtcacggatatgagagtcgcaatgtcctcctcggttatgagttttttcaatcgtttctcctccttttcttttttatttcgcttccctaaataaaaatccttctccagaaaaagaaagcgtccttctctgatgggaagaacgcttttttatcattatacacttttcacctgttctaaaggattccgttcaattacgcttccttctgacgggacggtaagcgccgcaatctcacagtgggggaaatgctcagaaagctgttttctcagctcttctccctttcctttttcaatcaggacaagaatcgtcggtcccgctccgctcagcgccgttccgtaagcgcctttcatttcggccgcatgttccacctttgaaagctcaggaacaagcatggcgcggtacggctgatggaggatgtcttttctcatcattttcccggcgagcgcccagtcatttgacatgatcgcagcaacgagaaggttgctgacggcgcttgctttaacggcgtgccggtacggcagctctttcgggagcacgtctcttgcgtccctggtcagaacttcgtaaaacggaatcactgccacaacgtcgatatccgcttcggccacacgcacgatatgtgtttcaccttcttcgtgaaggccgatcacaagccctcctgcaagagaagcagcggcattatcaggatgcccctcttcaagactggctaagtgcagcttgtcgctttccgaaagctgcaggccgcataactcatccgcaagctcaatggcggcgacgatagcggccgcgctgcttccgagaccccgcgcaagggggatgtcactccacactttgacatgggcgggcggcagctctttctgatagcggtcagccgtccgtttggcgacttggtagatgaggttgtccgttccttgagggatgcccgcgacagtttcggtttccgccgagaactgccattcatcgtttcggaaaaccgaaagcttcaaatatctgctgagcgccatcccgacggaatcaaacccaggccctaagttggcggtgcttcccggaaccgtaatggaaaacagcatctccgcctcattcatacacgcgccgctccatttaagtattccagaatactgtcctcatctgtcggcagcgtgatcggttttatgtcagatacgtctacagccgtgttcggatctttcaggccgtttccggtcaaaactgcgacaaccttgctgccttttggaatttcaccggattttacctgtttcaaaacgccggcgatggatgcacaggagcccggttcggcaaacacgccttcttcacgggcaatcagctgataagcgtgaagaatgtcttcatctgtgacttcatcaatttttccggctgattcttccgcagcgagcaccgctttgtcccagctggcaggattcccgattcggattgccgtcgcaacggtctctggatttttaatgacttcgccgcggacgatagccgcagaaccttccgcctcaaaaccgcgcatcttcggaagtccggtgccgtttttctcatggtattctttgaaccctttccagtaggccgtgatattcccggcgtttcctaccgggatcgccagaatgtccggcgcttcgccgagctgttcgcatacttcaaaggccgctgttttttgcccttcaatccggtaagggtttactgaattcactaatgcaatcggtgatttttcgcaaatcgaccggacgatggccagcgcgtcgtcaaagtttccgtcaatcgcgatgatttccgcaccgtacatgacggcctgcgcaagttttccgaaggcgatttttccgtccgggatgatgacgatgcatttcatgccggctctcgccgcgtatgccgcagctgccgcggatgtgttccctgtagaggcgcacatgatggtatcattgccttcttctttcgctttggcgaccgccatgaccatgccgcggtctttaaaggatcccgtcggattaacgccctctgttttcacatgcagttcaattccgagcttttcggaaagtttcggcaggtgaatcagcggcgtgttgccttcatgcaatgtcagggccggcgtctgatccgtcaccggcagaaattctttatattgatggatgagtcctttccacattagctccaaccgttcccttctacgcgatatgtgctttttacttcttgtacgacttcgaggtcatttaagttttgcagaatgtcactgaaatcttcttccgatgtatgatgcgtgacgatgacgatttccgcgaggtcgtcatggcctttgatcggcagctgcagaattttttcaaagctgacgccgcgctctgagaaggccgatgtgatttttgaaaaagagccgacctggtctttgacgtgaattcttaaaaactgctgggcatagatatcagacggctgcttcagatttctttcaaactgcggggcgacaaagctgtttccgtttacgccgagacgcatgtttttcatgaccgcgaccagatcggaaacgaccgatgtcgcagtcggcatgcttccggctccggggccgtaaaacatcgtttcgccgacggcttctccgtacacgtaaacggcattaaactcgttatgcaccgcagagagcggatgatgatccgggagcagtgtcggctgaacgctgacttcgattttattgtcatcacgctgggcgatgccgatcagcttcatcgtatagccgagccgtttgctgaagctgatgtcttcatccgttatccgggaaattccttttactttgacatcgtccagatcgacattcatagagaagccgagacgggctaaaatcgccatcttgcgcgcggcatcgagcccttctacatcggcggtcgggtccgcttccgcgaatccgagatcctgcgcttccttcagcacttcttcatacgggcttttttctttaatcattttcgttaagatgaagtttgtcgttccgttgacgattcccatcatttttgtgatccggtcagaggaaaggccttcttcgagcgtgcgtaaaatcgggattccgccggcgacactcgcttcataatacaagtcacagccattttcctttgcggcggctaaaagctctgacccgtatacggcgatcagatctttatttgcggtcacaacatgttttttcgctttcaaggcatcaagaagatattgcttcgtctgttcgacaccgccgatgacttcaataatcacgtcgacttcagggtcatcgatcacatcatagacctctgtcgtcagcacttctttcggcagatctgcgtctcgttttttatcaatatctttaactagcacttttttgatcgtcaccggacagccgacctggtgcataagcttatcctgatgatcttgtataattttgacgactccgcttcccacggttcccagtcctaacagtccaatacgaatcgcttccaaagagaaactccacctttcttccttttgtccactagaaaaggacaattgttaacccttcacagacatttaagttacaaatattatataagcccgcatttgttttgacaagcggctgaatattgtttctacggctatgaaaacgcttaacacactgatatgacaagattccctattttctaaatatttttacgtcatattttcttacgaactgattcctttcccgagccacgccacaggcgggacaaaaacctgcgccgacctgacattcatcatgttgtgacatgtctgtaaaaactgttcatagcgggtgcagtcggcaagaatgtagtcaagctgctcttcgtaatactgtttttcagaatcatgagaaatgtaatagctctccaccgtctcgaagaaatggagcggaaacagcaggcggctgtaaaacaggcgtttggaaaaggaggataacggcgtaacttgctcatattcctgcagaaacaaaaacccatctttgagcaggtcgtcacgatgatacaaatatgtgctgcgcatatattccgcaatatcacgggcagcatggtcgaatacccaatcgcccggaatgcggatcaatgattcctccgaccaggtatcccgttccatccgctgatggcagattgtccccgagtcttctgcgccgggattgtcatccagctccgtatccactaaatattgaatggcgttttccgctaagcctgaataataaggaaatgcttcgatcattttcttttcgaacggttcaagcggagacatatgaattttctgcatccagaatgattccagctgatccacccgttttccccataagtccttccattggccgatcctgcccgcttctttcacttcgtacggataaccccgcccttttctgtgaaattcggcaagctcccctccgacagaaaacgaccggtttgagacgggaatcggcgcttttaagagcgcatacgttttgccttcgtcctcaaaggtcagttctccttccttcgtaaagataaacactgaaacgtatgggtcactttgttcttgtaaatactgactcatgtagtaaagctccgtcagctctgattgcgaaaacccggaaacgggaattataagaaagaaggaattaggcgtctggaagcattggtatttctgataaacggaaagctgtctgacgtggatgccgtacttttctttaatgatgcttttcatcataatcacctgcctgaaaaattagagctattcacatcgtagtcatacgccggcggaattatgaatacatattgtaatcctttgaatcaagtggagaaacatcgtacacatcggaagagtgttgtataaactagtaaaaaaagattgggtgaagcaaatgtcagaaaaggaacaactgaatcaggtggaagctgtcgccagggcgcgtttaaaagaacggggggttgagacggacgatattgccgagctggtgtatttccttcaaaaaaaatatcatcctgatttgacgatggaagtatgcaggctcaatgtggatcgtgtcatcgcaaaacgcgaagtgcaaaacgccattttaacgggaatagaattagatgtgctcgccgaacaaaaaaagctgtctgaaccgcttcagaccattctggcgattgatgaaagcctgtatggggttgacgaggtgctcgccttctctatcgtgaatatatacggctcaatcggctttacgaattacggctacattgacaaagaaaaacccggtattctcgggcggttaaatgataaatctacgggcgaatgccatacgtttcttgatgatatcgtcggcgcaatcgcagcagcggcttcaagccggcttgctcacagcgcaagaaatacagaataaggacggccgtcatggccgtccctttttttatagatgttcaatccattcggttaaagagtcaatcgcatatgtcggcttctggccgtaatctgccatatgctcacgctttgtcactccggtatgaaccagcagcgtatccatgcccgcattgatgccggccataatatccgttgcatagttatcgccgaccatgagtgtttcggaaatatccgttccgagcacacgcatcgcctgttccataataatggattcaggcttgccgataaagacaggctcaacgcccgttgacaccgtcaaaacggatgtgagcgaaccgttccctggtaaaagtcctctttcagtcggaatggcgacgtcgccgtttgttgaaatgaaccgggcgccgtttctgatcgcaaggcatcccgttgccaacttttcatatgtaatgccgcggtcgattcccacaacgacaaagtccgcgttttcttctccgaagctcagcccgttttcttcaatggcctgacggatgccttcttcgccgatcacatacaccgacgcgtcttttttctcctgggcgatatgctgcgcagtcgccatgctcgtcgtgaagacctgctcttcagatgccggaatgtcaaagctcatcagcttgtccgccacctgcttcggcgtccgggaagaattgttcgtcacgaataaatacggaatgccgcgcgctttaagcgttctcacgaattcacacgcttcttcgattttttccgtcccgttgtacattgtgccgtccaaatctatcaaatatcctttataatccttcatactcaacactcctgtggattttctcactcgttgttatttaaatgcggaaacaggccctaattctgtttccagataggttcttacacgggccggaaaggctttcagcacatctctgtttgacgtgatcagcgtaaacagctcttgataatcggcgtgctgatattcctggacaagctgctttctggaagagatcagttgcttcagcttatttccttcatcctcagctaccaccttttcatccgtcagaatatccatgatgtcgtcataactgcccggatcgcgcatgataaagccgtcaatcatatcatttccgacatcgagaatgcattcgatcataagatggctgatccgctcaagcgcccttttttcgatctcgctctcccatgcaggcgtgctgtcaaacagcgccagctgggtctcaaaaaaacggagtgtttgttcgatattatttctgtcaacaaaatacacgtgacagcatccccttctgcatcaattattttctgattcgttttaaaacaaaatacgcgcagccgaaattgcagtattcgtaaatgtattcgtccaatgtgctgattttcgtttcaaaggttgctttttgattctggtcatcaaagaagcctttgagccgcagctgactgtatccccagtctcccacaatgtaatcatatttatttaatatgtccgaatagcgggctttgaacgcttcttcattaaagccgtttttaaaatcgtgtacgagttcaaactcggcattttgaataagaatcatgtcttcacctcttttatcactctttactatcataattcattgacttctgtccatcaattgcaaaatgagacggttcggacggacggagaatttttcctctttatatccagtgtagcggttcagacgatccttattcaagaatgactttttccctgcaaaaacggctccatcacaaaaaacccaaaacctgcggcgttttgggttttttcggcttatcttatgcttgggcctggcgttttttagacgcttcgttcacttgttcatccgcatggtaggaagaacggacaagcgggcctgcttcacagtgactgaagcctttttgcatcgcgatttctttcagttcggcaaattcgtccggatgataatatttttggacttttaaatgttttttcgacggctgcaggtattggccgatcgccatgatgtcgacattgttcgcaagcaggtcgtccatcacttcaataatttcttccttcgtttcgccgagaccgatcataatgcttgatttcgtcgggatgtcaggctgcatttctttcgcacggcgcaagaattccaaagaacggtcatatgttgcgcgggcccggactctcggtgtcaggcggcggacggtttcaatgttgtggttcagaatatcaggacgggtatccattaatgttttcaggttgtcgtaatttccgcccatatcggatggcagcacttcaattgtcgtgaacggactttttctgcggatcgcccggaccgtttccgcaaagacgcctgctccgccgtctttctgatcatcacgcgctacggccgtgatgacggcgtgttttaaattcatcagcgcgacggaatcagctacgcgttccggttcctgcagatccagctcggtcggcagacccgtttttacagcgcagaagcggcatgctctcgtacagacggaaccgagaatcatgaacgtcgccgtacgtctgacagcccagcattcatggatgttcgggcattttgcttcttcacatacggtatgcagattattttcacgcattaattttttcagacccgtatagttttcattcgtgttcagctttattttgagccattccggctttctcagatgctcgtctttctttgccatttccccatcatctccattatccctttattcatgttcgtgtgcgaaaaatttctatttcacgatggatataaaacttgcggatttctattcaatagtcactttaacataggaaaaatttctcgacaagggaagagaattacttacattttctcggattgttgccgcaaactatttgtattcaatcctgaaaggagatcatgttgtgaaagttctgttatctgctcttctccttttatcagttttctgtccggctgcaagcgggaaagaacaatcggctcctgtttacggcgaacggatgcagttgtaccgcaaagccgaagcagtcacgcagattccttggtatgtgcttgcggcagttgatcaatatgaagaaaatgtccgctcaaaccgaaaggatctgccggaaaaagcgggaatcatcagcatttatattccggatcatttgtggagcggccctgaaaatccaaatcctaaggacgatgcgcctctcagcattaaagtatttgacgggatcggcctggacggcgacggcgacggaaaagccgaggtaagcaatgatgaggatatcctttatacatttgctcagtatttagcgggattcggaaccgatcttgaccatatccgcatcggtctctggaattattaccgccgcgatcagacggtcggcattatcaccgaattcatgacactgtttaaaacgttcggccgccttgatctcggagagcacgcttttccgcttcccgtgaagacggattacagctaccgcagcacatggggcgccgcacggggtttcggcgggcgccggattcacgaaggaacggatctgttcgctcattacgggctccccgtcagatcaacctgctacggtattgttgaaatgaagggctggaaccgtttcggcggctggagaatcggtatcagggatatcaataacacgtatcactacttcgctcacctgaacggctttgcaaaaggtgtgcataaaggccagatcgtcaaacccggagaggtgatcggctctgtcggcagttccggatacggaccgccgggcaccgcgggaaaatttccgccgcatcttcactacgggatgtataaagataacggcagatcggaatggtcttttgatccgtatcctcatttaagggcatgggaacgtaaagaaatccgcaggaaaaagtaaacacacagccgccgggaaagattgcggctgtgtgtttttatttatctttcttctgtttttcactcggcagctggacggaaggcgtcacacctgacccgccgcttccgttataaaactgcggcacctctccttgaatcgctttaatggagaccggaatattatttgtcacgactgatgtcttactggcaaacggaataatgaccttcacttttatttccacaaaaatactgatatcgatcagggcattgttaatgccgtacggctttatttttgttttcacatcagttaacgcatcaccgatcaggttaaagcgcacggggattttcggccccagatttccgagaatgctgtttcctgtgacctgccctaagggaatatcgatcataatttcatcggccgttttcgcgcctttttccgtttcacgctgcttattgttcgactccgcttccttcagatgagcctgaagctgctttgtcactttcgccttcatactgttgaccatttgtgtattaaaatccatcgttgtgacttttccgttttcatccgttttcatatcgaccatatctttcacattgtcgctgtgagacatgtattcttcaatggattccgtaatgacctctgtcgccacccgtttggtttccatttctcctatgttcatcagcaccggtttgattgaggagttgatcatccaaaggctgatgaccgtcgatatgataaaaaaagcaaacgacagaagaagcacatatcgaaaaggcaaaggccctctcttgcgaagagcgctccggtatctaggcaagaaaaatccccccttacatatcacaatgtatgcttgtaagaggggacatagtattttatttttgctcttaaaaagtcccgctttcactcattcgggtgaaatggaacggcgggcagctacatgacattacggctgctgcgcgagcttccaggcgagcagatcccttaaaaactccggcataaagtattgcttttcttttgaatcgcggatgtaagggaacagctttccgagtgtaaacatatcgagaacggcaaccgagtatatccgctccggatcaatctcttctccgttcactttcacattgaggagatgcgtcacaccgtcttcaagaatgccggcctctgcctccgctccggcatataccatcctgcccatcacttccccgcggaagccgaggccttttatccgcagctgctccatttgttccgaggcggcctggctgattgtttcctgaagttctctgcctgaaagacgaacggccaccggattgatcggatgagggcagatacggtgcagatcaagctttgtgacaggccccttctgtaaaggccccaaaatgacgcctgaattcaccatgctgacttcacagccgcaccagcttttcagcgcttcggctaatagaagcgggaggggcgattcctcaaaccacttcacgccggcttcttcattcaggttggcgacttgttcggagagcaggttttccgcttcccgttctttctctttcagaaaagccgccgtatcttcacattccccttgccaatcagccattttctgtacagatgcctgtttgctgacaatggttcgtgattcactttctatcgtcagctcgacacagccgacatagttcccgtatttctccgcacatgccagcaatacgccgtttatgtcttgtccgtcctcaagaaggtggtgcgtatgtgattcaagaatgacatcgatatcgggaaatttttccgctgcggcccggtcatcgatcaggcctaaatgagaaagcagaataatgatgtccgctttgcccttgatatcgtcaagtgattcttgaatgcttttttccgcatccgtcaccgtccagcctagtttttgatagacgggataatacggcaccgtgacgccgagtatgccggcggtcatcccatttttcagcgttttgatcacgtagggctcggcccattccgggcgctgtccatccgcgtcaaacaggttggacacaatgacgggaaacgcggcatgggtatataaatccgccagctcatcgtgaggcagcgtaattccttcattattcccgacggcagccgcatcgatctcaagccggtttaacaagtcgacattcgctttgccgaaggtcgcttccgttatcatttggaatcggtccatatgatcgccgatgtcgaatacgagtgtttcctccccgtctttttcatgttcatttctcttctgctcaatataatgtacgattttcggccaattttcgaaatggctgtgcaaatcattcgtatgatataaacggagcttctctaacataccatctctcctaccttttagctgaatatcccttgataaatcaattcacagccgatcaaaatcaagacgacccgcatgaaaagcacgatcgttttcgtctgcacccgcttattgacccacgcgcccattttgccgccgaaccacgcgcccggaacgaggcacagcgcatacagccaattgacatggccctctgcgatatgtgacacggaacccgtcacggaggataagaaaataatgagcattgacgtcgccacagccactttcggcgggaacaaaaataacagcatcatggccggaaccataagagagccgccgccaatgccgaaaagaccgcccaataaaccgacgaaaaaggcaatcacgataccggtgaaaatacggtacgaatatgtataaagctcacccgattcatcctcatatgtccggatcatgcctttatgcgctttattgaccggttttgctttcgccttcagcattaatgtaatggaaatcaaaatcataaaaagtccgaaccagacggaaaacgtatgcgcattaaaaagtttagacaaatacgcgccgatgatgcttcccgggccggaaccgataaaaaagatcagtccgcttttgtaatcaacggttttatatttcatataggccagagttgatgacaggcccgtaaaaataatcaccaaaagggacgtgccgatggcagtctgcggtgttacgtcatggaaaaacggagtcatcgtgcttaaatagagcattgccggcacgatgataattcctcccccaagcccgatcaggctgccgaccgttcccgcgataaatcctaatatgatcaaaataagataagacatgtgtcttgaaacctcttttctagctgaataggtcgagctgcttcggagcaagcccggtatatgagatatttaacatttcaagcatctcaagcccgttatcggcggcgtctccgcctgagttattattgaagagcacatacagattgcgcgactgttttttcagcacctgaagattgtttttccaatctttgagctcctgtttgttatagcggtataaatatctgacctcacgccagttttgtccgccgtctggtttgatccagccctgcttgttccgcccgtgaaaacggacaagcgttttttcttcatccgttgctttcaggacggtcggaatgctgccctcgccgatttgcggctcgtcacatatgctgtgaatccagccttcctccttcataaaggaaagcgtctgttcataaaatggcggggaaaaccaagaccggttgcggaattcaagcgcgcacgggatatcgcccatctgctgcctgcaccatcttaaatatgcgacgttttctttcttgcagtcaaaccacggcgggaattggaacagcaccatggcaagctttccatgctctatatacggcgataatgacagcttaaacgcctcaaacatttcttccttcgattcatagggaatatcgccgcgctgatggcccgtcattccttgatatgccttaatgacaaattgaaaagattccggcgtctctttgacccatctttcattattgcgggcgggctgtatcgcgtaaaagctcgcgtccagctcaacgatgggaaaatgagaggaatacgcctgcagtttttgcgggcccgctgttttaggcggatagatgctgtcatgatccccccaccccgtcagtccgatataaatcacaatccttcacctctcactctagtttatcacaggtgtttttctctttccgtttccatgttttttctgaatgcacttttcaggaaccggtattgatgttcattggtgtccgaaaatgcctcatccctggatgaaagaatgtgctgatagacgatcggctctgaaaactgaccgctcgtgaaatcatatatctccccgtctatccggttataaaaatgccagcttgtgccggtttttgttttgagaatgtcaccgccgtaaacatcttggatgactaaagccgtcacgccgcactggcctttggccgggcaatcttccgtccattttgtactagtcttgggcgaccaggatgccgttaatatgttcaagatttggtcatacaatgtgttttactcctttttataaaaagataccacgagacccgctttccaaacgacaaaaaaaaccgattctcatcagagaatcggctcttttatttcagaaggcttcaggaatgttccgaaagccccgctctgcttacggccgccatcctgatacacacagcgtcccttgctgtaggtcgcagcaattcggtatggaaaggtgcggccttcatacaggctttgcttatgtttggaaaacatcgtttcttttgtgacggtaaaaggttccggccggacgatggcaaaatcagcgtcaaatccttcttcaagcaggcctttattcgttaaaccgaagcgcttggccggtgcttcggccgtccatcgggccacatgttcaaacggaatcccatgatcgatcgctaattgaatcatgccgagaagcgtaaattggcctccgctgatcccgccccacgacagaaacatattatcctcgcgtttcaaagacggatgacagggagaatgatccgaagacaccatatcaatcaggccctctgccaaaaccccgatcaattcctctttatcagcctctgagcggagcggcggagcgcatttggcggccgccccttttttgaggaagtcttcaaagctgaataataagtagtgcggacacgtttcaacggtgacatccaatccgtcttttttcgcctgctgaatggagagcacggcccgtttcgtgctgatatgtacaaaatgaagcgcgcatcccgtcgctcttgcatattcaatcgcccgctgcacagcctcgcattcggcttcttccggacgggaggaagcgtaagcgcgggcatcaattttcccttggagcgcgtactcggcttcaaggaatcgggtgagggcgtcgctttctgcgtgcagggccaaaatcttgccgcacgccgcgatttccttcattccctttaaaagagtccgttcatcggctgattgaaattcatccgttcccgatttagacagaaacgctttaaacccgattgcccccgcttctgccatcggccggatatgttcggtatatccgggcatcaaaccgccccaaagcgcaaaatcaaccgctgacttccgttcggcgatttccgcctttgccagcaggttttcagcagttaccgtcgaagggatgcagttaagcggcatatcaaaataagccgtacagccgccggcagccagcatgtttgagccggtttcaatgccttcccattcttctcggccgggttcattgaaatggacgtgacaatcgaccgcgcccggaaacacatacatgccgtcctcctgcaccacttgttccgcgttttcgtcaatgccgggtccgatcaaggcaattttcccgtccttgacggcgatatcagcccgctctgttccgccttttcgcacagctttcgcaccctttacaattacgtcataggccattttatcttcctccctgtaaggatgacgatttttctgtcagtttttatcacaacatgcgtctatgattgccagtttactgctactatgatcgtaatacatcagtaaaaccgctataatttttgatgatttttattcatattaaccaatggttgtctttagaacctgaaaggagactgactgatgaacatttatgacgtgatgaagattcccgcttatgagcgggccgcattaatcgcaggcagatccggcggctggagggaggtgcagcacgtcaacatgatggatgcgccggacatcgctgattttttacataaaaacgaattgctcgtcacgacggcttaccacttgaaggaccgcccggagctgttgaaagatttgatccgcctcatggcaaaacggggctgcgcgggactggggatcaaaacgaagcgttatcttaatgtcattccgaaagatgccgcggagcttgccgaccggtatgaatttccgattattgagctgccggaagacatcaggctcggagatatcgtcaacgccacactgagccatattcttgatatgcgttcaaatgagctccagcaggccatttacgcccataaaaaattcacaaaccacatcatgagcggcaaagggctgcaatccctgcttaagaagctctcagacattctccggcttcccgtgctgcttttggatcagcatacaaaactcttatcatcgtcccaccgcatacccattgacacgtctttattgaaaaacatctgttattccctttccgggccttatttcacctgcttttccatgctgtccgacagaaaggcgtattctgtcctgccgattctgaatgttgaaaaaaactgcggttatctggtgatacctgatctggtgcagaccgctgataaaggcatgattttgactattgaacaggcggctaacgtcatttcctttgaactgctgaaagaaaatgccgtcaaacaattcagcagacgggcgcgcaatgaatttttcagcaatttcatcgaccgctcgtttaccggccatgaagaaatcaaaagccgcgccaaagaattccggctccgctgggatcagaaatacatgtgcatttgcggaaagcttgaccgaaatgagaaaacgatcagctttaccgaaaatcagctcgtttccgatcatgtatttgatctgcttgaaggggagctgtcatcctttccgtttccccctcatctctttattaaaggaaatgtcggtattcttttaattgaagcgacagacagctggaatgaaatgcacgcgtctgtcatcagctttttggagcagtttcaaaagcaggtccggacgcaatttaaacggactgtctccttcggcatctcaaacatatgccaaaagctgatcgacgtccctgacgcttttactgaagcttcagacgccatttcatccgggcatttgtccagaagcgcggagtttattcaaatctatcatgccaaagacgtgccggagctgctccgcctgcttccggcggaagatgtgaagaagttttacgaagccaccctccaaagcctggcagaccggcaaaaggaggaccagagcctgcttcatacgctgtctgtttacctggagacccactgccagatttcagaaacggctaagcgcctgtacgtccatcgaaatacggtgatctatcgtttagaaaaatgcgaggaactgctcggcaaaagcttaaaagatccggagacgacgatgcgcctgcggctcgcgctgagaatgcagcggctgatcggttaaggaatcgttagagacagggatgcgggtgttctcccgcatcctatttaagggggattgattcagcttaattctcaaaaaatgctgccatcaacatctgcttccattgacatcatcagccgttagttatgattttcagcagactctaatctaaactaaaaaagcctttcccgaagaaaaggcttttgctgttcaagtctgaaaacgatccgaagcagtttgaaaggtatcatgtgttttttccactgtgttcacacccaatccgcatactaaagataacgacagacccaaaataatgaagatgctttttttaaaattcatacaggcattctccttcttaggtttgattacgatcagacgaaacttgatatgatccatcaaatgaaacagccgatgttgctagaccgacccctgacattaaaacgacagccgacacaatgataaatacgccttttctaaaattcatacaggcattctcccctctgaatttgtttttgcgtttgaatcattttttgatgataaaaataagatttgtcatattgctttgactctgcataaacagcagccgtatcaagagcaatatcttctacatacgaatagtttttatgtttctcaaggtaatcaattgtttttttgattcctatttggtctattgcattaatatataaagcctccaaatatttttgcagagattcaaacagcttatctccttgaaatatcgctgatgaaagtccctttttgctgatttgaatcgcctcgcttgttttcccttgtttaaatagaagctttgcgtatgtaaacaaggaatgtggaaggttacccaatttatacttttcagatatctccgctgctttttttaagtagatttcagctttactgtattcttctaagtctccgtaattctttcctatgttgtaataagcagaactgagcagcctttcattattgtttacttgtttcgacaactctaaagctttttctaaatgcggcaagcttttttcataacgtttaaagtctacatagttccctgatacgacaaatagacattgaattttccggaccttatacaactcatactgatcgtaaatatcgagcgcttgctttacgtgatgcatagagacgtggctttgtttcataccgtaatatgcttcagccagtttaaaatgaaactccgctctctcaatttcatcatgcacatgaacgagttgtttttcagcctctctataaaagccgatcgcctttacatactgcttttgatcaaattcatacatgccgcggaaaaataaagaataatagcacagcaggccggaaattcctttatttgatgcttcgattttttccaacagctcgtcaattgtcggtctcacacgggtagtcaccggttctaaataatccagcatgagctgatggcggaatttcatgagggtgtagtaaatcagtagatattcgtcttcttccatctcatttatttcttgttccacttccgctttcaaaatctccgcatccggaacactgaactgacgtatcattttgtaccattcattaatcttaacgccaacctccgatgatggtaaaacagaactcacaaggccactcctccttttatataatattctaacatttccaaaattatgtatatccgcaataaaaccgcaaaatttcattcgtcttgatcataaatcttggtttgagttttaagtctacaacaaaaaaagcagtccctatgcagcctgcttttttttgagaaatttatctaagatgaacataaataatgtgaataacagagacataatcaacatgtctagtatagttacattagaattttcttttactaagaagaaccagagaagttgtaaaacgaaagaaatcacaaaatacaatatgtacctgatactatttatgtcaatccatcccttcgcttatcttattgccctttacacctgaaccatgctggaatctcccggtaatgatgagtataatatatgcagaatgtaactggagctgatctaatcatctcaacttattttaaaatttcaaaacgtgcaatttcccactctttgtttgcttttagcgggattgtttttagctttttgcctgatttcaaatcataagacgtgatgtctccaagcttctgatcgcgctggatatcaaagtttttgagtaaaacatacatctctctgtcagtgaattgaacatcattcattaatttgttatcatcccccgcataaaaattgaaagagtttttcttaaccatttttttatcaaatatctgcagcttcccatcaaaagaaacagctaagatgctatcttttaatattttcaattttgcaggatgaaaccctttctccatctcgacttcttttttttccttaagagtctctctgtctattaatatgagcttagaattctctttctcattcacgttatcattaactgccagtacaaatgtattttcatctagagcttggaatgcatccttttcatccatgaagtatatccctttattcggtatggatgccttgttctcttgcttatttgtctctgggttaattgaaaggatggacatactttcttcatcacttgaaataacataaattttatttttagcgacgattgctgatccaagttctccgtcaagctttatttgtttcttgttttttcggctgttccccttccaatataccagttcactttccagccctttgtctgtatatccaacgttaatgtcatggatgatataaccgtcagaactatttataaagaaagcaccttcatcctcagttgtttttgacaaactcttttcatttattttgtttatttttccggttttattgtctatcatcaagtgattattgcttctatttgatagaaagaacgtattatttttgttatgtgaagacatcgtgaaatttataccatctttcaattccacgctatccattttaataccatcttcaccgtaaaccccaatctcacttcccctatctaaagtgttagaaaaaccaacaataaattttgcattgtcaatatcctttaatacagtcttttgattgctgcttctttcctctttttcattcccagttgggatgagaccgcaagaggttgtgacgatcagtatgcaaatgaaaataaacagggttttaagtctactcatttttttcctccctatgagatagcaaaaagcctccggatacacggaggctttgattcttatccttgctgcgtgaacggccgggtctgtgtctttttgccccagccaagcgcggccagaaaactgatggcgagaatggccgctcccagcatatacggaaattccatatttacgtcaaagagaaaaccggcggctgacggtccggcgatattcgctaagctgatgaatgaggtgttcatcccgccggcaaacccctgctggtcaccggcgagcttcgacagcatcgtattaacggccggccggagcagcgatgtcagcgtcaggaaaaagattgccgcggcaaaaacggcccaatatgaacccgcaaaccggcaccacacaagtcctgcagcagccccgatcaacgtcacgttaatgacgcgcttttccccgaacctgcggacgagataactgacgccgaccgcctgcacaaacacgccgatgagacccgcagccgtaataataaaggcaatatcagaggctttaaatccgtgtttatggtcaacgtaaaggccgaaaacggattcaaagttcataattccgaagttcagcacaaaaaccagaatcagcataaacgcgaacggcgatttgagcgcgcgtgacatttgcttaaacagatgctcacgtttttccgtttttgcccgggcttccagctgcttttcacgtcccagcgtttcaggcagaaagaaaaatgaaagcaccgttgaaaagcaggcgagacttgcagacacgatgaacggcacagacatgccgtaatgaaccaaatagcctccgacaccgggcccgatgacgacaccgagcgtcatcgccgcgctgaacagccccattcctttcccgcgttcttcttcggtcgtaatatccgctatgtaagcgaacattgacggcattaaaaacgccgcgcccattccgcccaaaaggcgggatgcgaacaattgccacaggcttccggcaaaagcgaagatcaattgtgacacggcaaaggcggcgatgccgaaaataatcagtttccgccgtccgtatttgtcggttatttccccggcaataggcgcgaataaaagctgtgtaagccccgccgccgcaacaagcagacccatcgtgctgcccgtcgctccgaattcggtaatataggtgggcataatcggaataatcaatccgattccaagcatcgcaataaacatattcagcattaaaattgacaatcggcctatgtacgccatgatttcttaccttctccccagacaaacggatgatcattccatatttgtcattttttataccattcagtataacggggaaaaggggaaaaagtccagatgatttcaatctcgttttcatgtctcatgacagcacaccggtttcagccggcagatcatatatgttaagggccgcctgcagcgcttccccggctttaacggcaacaccgtgtctgatcagaaccgcttcaagtccggccagcacaaacagcacattttcctttctgcagctgtagcccatcgttccgattctccaaattttcccctgcagcggaccgaatgagctggcgatttcaattccgaattgagacaaaagcatccttctgatcgattcgccgtctgcttccagcggaatcttcacgcatgtgacgacaggcagcttcgcctccggatcgccgaataaatcaagtcccatcgctgcaagtcccgccgtaagcgctttttcatgacgccgatgcctgcggaaccgttcttcaagtccttcttccaggacaagacgcacaccctcccgcagcgcataaagcattgctgtcgcttctgtatggtgattcagccttctttcactccaataatcctcgagctggctcagatcaaaatagttgctcgtaatcggccgatgaccggacagcatgttgccgtcagctgccgtcgcaatgccccgttctacctttttacgcgcggcaatgacagctgccgtccggtcattataagtaatcggagccattccggaggggaccgataggcatttttgcgttcccccgatgactgcgtcaatcttccattcatccgtttttacggcgcagcctccgatcgtggccacggcatccacgataaagagtgcgtcttgggcgcggcacgcttccccgatttctttcagcgggtgaatccgccccgttgatgtttctccgtgcaccatagcgacgattttcggggaaatctttttcatctcgctgataatctcttcaggccggaagaccgttccccattcacactcgatcgtatgaacgtccgctccgtaccgctcggcgatttcagtcagcaggtatccgaagcgtccgtatatcggaacgagcacgctgtcgcccggttctatcacacttgcgagaacagcctcaatccccgctcttgatgtgccgtcaatcggataggcccagcggttttccgtttgaaacaattcacggagcatttgcatcgtttcgttcatgatgccggtaaatgccgggtcaaactggccgatgatcggagcgcccatcgccctcagcactctcggttcagcttctgtcggtcccggtgtcataatggttctttgcggaatgcacaattcttttctggtcggcacgccgattccccctttacgttaataggcaagtttatgtaatacattcgccagcgtaaggacgccggtttcaagctgatgtgcgggtgtgaattcaagcggcgagtggctgattccgtcacggctcggcacaaacagcatgcaggccggaaaggttctgccgagcatctgggcgtcatgtcccgctccgcttacgattttctccgggtccgccccctgttcttttgcagcctccgctgcggttcgcgtcagtgtctgattcatttgaaccggctctatcctcatatattcatcaataacgggcctgactcctttgctgcggctgatgttttcaacaatcgataccagtttctgatggaaggctgccagcacgtcttcctccgggtggcgaatatcaacggaaaactggatacggcccggaatgacattcgccatattcggttcaaccgtcattttcccgcacgtcaggcggagctcttccggctgtctttccgctgagagcatcagttcgtggataatgctgcttcccgccgcgagcgggtctttccgccatttcattgaagtggtgccggcatggttgcattcaccgtcaagcgtaacggtatagcgtctctgtccggcaatcccggtgacaatcccgatatcccttcccgatcgttcaagcgtttgcccctgttcaatatgaatttccagaaaggcactaatatcagtgcgcagcggtgctggataacggcctgcaccgaagccgttctgccgcatggcttctttcagagaaatgccggacgcgtctttcggcgtttccgcatctgaaagcgagaaagcaccggtgatattgcctgagccccaataggtgatgggaaaacggctcccttcctcttcacagagcgacacagcctccagcgtttttttcggacgcccgcacgtctcatgcaaatgccggatcgccagcatgcccgccagcacgccgaacgcaccgtcatatttgccgccgtcaataacggtgtcaatatgcgacccggtcagaatcacctcatcaggtgattctgtgccgctcagccggccgaacacgttaccgacatcgtcaaatgccgtttccagcccgaacgcctccattttctttttgacggcaagctgggcgtccatccattctttcgtatataaaagcctcgtcactccgccggaagcggaagcgccgaattgagacagccattgtatgtcatcggaaatcccgatattcgccgacgaaagctgctgatgttccatacacgccctccttttaaactgaaaaactgacaagatgatcttcattatagaaggagcgcataacgagttcattatcatatcttccaaaaaatcaatgattttccggatactttgaccaataagccgaaggaactatttttcaaaaaagatagaatattagatttattttttggataatagaggtaaaggagggcaagtcatgacaaaaaaactttggtttctgccgattgtctgcctgtttttcatttttggatgggccgcgccgtcagcctctgcgggcgcgccggctgacacgaatctgtacagccggatggcggtttcaactgccggcggcacaactctttttccgcaaactgcctcagctgtcatcactccgtctgcggatacggacacatattacaaagaagcttccggaaaaagcggaacggccttaaagagcgccctgcaccgcatcatcagcggacatacaaagctgtcttacagccaagtatggaatgcattgaaggaaactgacgaagatccggcaaacccgaacaatgtcatcttgctctacacccaggaatcacgggccaaaagtaaaaacggcggcagcgtcggggactggaaccgtgaacacgtgtgggcaaagtcacacggaaacttcggaacagctgccggccccgggacggacattcatcatctgcgccctgcagacgtccaggtgaacagtgccagaggaaatatggattttgataacggcggctcagaatacccgaaagcgccgggcaattattacgacggtgattcctgggagccgcgcgatgaggttaaaggagacgtcgcccgcatgctgttttacatggcggtgcgttatgaaggagacgacgggtatcctgaccttgagctgaatgataaaaccggaaacggctcagctccttacatggggaaactgtccgttttgctcaaatggaatcaacaagaccccgtcgacagtaaggaaaaacggcggaacgaaatcatttacgaagactatcagcataaccgcaatccgtttatcgaccatccggaatgggcggacgaaatctggtaatcgtatcataagaagtgataagggagccccgatcatcaggctccctttttcaatatacggcgttttcagtgtcggcatcaaaaaagacggcccggttcatattgaccgcaagcagaatggcatcgccgggtttcacctgtgaagcgccgtcaagacggatcgtcatgcggtcatctccgctcaccgcatgaacgtacatctccgcgcctaagttttcacatacttccgccacagcgcggcacaccgcttcaggcgggtgctctgattgtccggcaagcgtcaaatgctccggacgcagccccgcaatcatctccttacctctgtatcctttctgcacaagaacggccgctttttctttcggaatgggcagacgaacggacgaaccggcaaaataccattgcccgtgactttcttcaatggcgccttttataaaattcatactcggagaaccgataaaacccgccacaaacagattcgccggataatgataaatctcatgggggcttgcggcctgctgaatatctccttcattcatcacgacaatccggtcgcccattgtcatcgcttccgtctgatcatgcgtcacataaacgatggtcgctttcaaacgctgatggagcttgctgatttcggcgcgcatcgtcactcgcaatttcgcgtctaagttggaaagcggctcgtccatcagaaacactttcggctcccgcacgatcgaccggccgagcgcaacccgctgccgctgtccgcctgaaagagccttcggtttccgcttgagcagatgcccgatttccaaaatatcggcggccgtccggactcgctctgcgatttcttttttcggcagctttctgagcttcaaaccgaacgccatattatcaaacaccgtcatgtggggatacagcgcgtaattctgaaaaaccatcgcgatatcgcgatccttcgggggcagatcgttcaccgcgtctccatcgatataaagcttcccctcagaaatgctctccagtccggcaatcattctgagtgtcgtagatttgccgcagccggagggcccgacaagcaccagcagctcctcatcttttacatctaagtgaaaatccttcactgccgccgattgggcgccgtatgtttttttgatatggtcaaatgttaatgatgccattcgaaacctcctccaatactggaaaccgccacatctttctgttatgttaaaaatgttcggggtttctgacagattcataaatgaaaagcaaatttgtattataacgtcataatacatataatagtactactacttgacaaaggaggtctgtcccattgttagataacgggagctcgaaacctttatatattcagctgaaacaaattatcgcggacgatatcaagaagggcgtttattcgccgtccgtaaaactgccgaccgaaaatgagctgtgcgaaacgtacaacgtcagccgcataacggtcaggaaggccatccttgatcttgtggaagaaggctggctcgtccggcagcagggaaaaggaacgttcgttaaaagccctaaactgaagcgggagctcatcgcggtcaacggctactctgaatttatggaatcaacggggaaaaaaccgaaacaccagatcctttcctatgaaatcattgaagcgcctaaatccatcgcccaaaaacttcgcgtcgcttccgaaagtcccgttcttgaattgaaacgcattttatttcacgacgaccagccgctctcattcgaaatcgcccactatccgctcagtttatttcccgacatcggcaagcatattaaaggcggcgtgtcgatgcatgacattttgaaacagcactatcaggtggtgcccacccataatacgaagctgttaaatgtcgtatacgccaagcaggaagaaagccgctatctggcttgtgatatcggggatgcgctttttgaaattgacaaaaccgcttttatgtcaaaagaccagccgatatacagctcgctgtttgtaatgcataccgaccgcgtcacgtttaccattaacagtccctatgtgtaacaagtataaaaaacgagacaatgcttatcgtattctcgttttttcactgcttttcccgccgcccggcctgtagggatgcccgtaaccgaacgctccgaaccctccgcatgttttggcagccgtcccggcggccgcagtaagcgctcgccgaatatcctgattttcgaagaaatcggtaagaaacccggcgataaaagaatcacccgcgcccaatgtatctattatatcagctcttaccaccggctgatgatagacgcgttccccatccgataacaccgcgccatattccccccttgtcagacagacgattttcgctccgaaaccgcgggctttttcggcaagccgcatacattcactttcactcaaatcactcccggaaaaaaacgcatacgtcacgtacggacagaccgcttctaaataggcttcgtcacgttttacagagaagtcaaaggaaatcggcacatggccgctcagcatcgggaggtcacgttctatcctgctgtatacgctcgtatgcagcagatcatgtccggcgataaatgagatgtcattctcctgaaaagcgagcgtcagacgcgattgcacgccgcctttatttgatccggcaaatatcctgtcccctctttcatcaagcgtgacgaccgccatcccgttttcgccgtatgcccggcggatcagatcggcattcaccttttccagtttcagcacattcaatacgtgatccgccgcttcatcactgccgagaatcccgatataagaagtttcgtggcctaagcgccgggcaagcacggctacgtttaacgcatttccgcccgggtaaaacgtctcctgatcctgataataatctactacattatctccggccgctatcagtttcatcttttcatcctccttatcctttcacgcttcccgcagcaatgccgcggataaaatatctctgcatcaataaaaacagcgcgatgatcggagcagcagaaatcgtcagcccggccagcagcacgccccaatccgtctgcagcgcatctctgaactgcatcagcccggccggaatcgtccgtaaattttcatcatcgataaaaataatcgcaaacataaactcattccatgtatggtaagccgtcaaaatgcctgatgtcaccagaatcggcacgctcatgggtaagaatattctgaaaaatattccgaaacttgtacatccatccagataggcagcttcctcaagctctttggaaatcgacaaaaaataggaacggatcagaatcacggtaaacggaatacggtaggcggcgtacggaagaatcaatgcccaatacgtattgtacagtcccaatgactggataatggagtacagcggcacaagactgacctgcggcgtcagcatcaagccgccaagacaaatgatcagcacaaacccttttcctttaaattgaaaacgggccagcccgtatgccgcccaggcgctcacaaatacggtgatgagacaagtcagcacggtcacaatgacgctgttcataaaataagcggaaatcccttggttccatgcggatacgaagttttcgggatgccagacagagggcagcgaccagctgtgctcaaaaatctcatccgagcttttaaaggcgctgaccgccatccataacagcggatatgcaacggcaatgaggtagataaagagaaacagccacacagacgtttccccgacataccattttctcggttttccgcctgttctgacggcctgacgggcatgacgcaagtccgtcttttcagaaagcatcggctactcctcctttccggtcttaaagaatttcatctgaataagcgacagagcaagcgtcagcaaaagcaccaccgtcgcgatcgcagaagcgtagcccatcatatcttttgtaaaagcgctcttatacaaaaatgtgctcagcacttctgaagcattgcccggccctccgccggtcagaatatacggttcattaaatacggtaaatgcgccggtcagcgtcatcaccacggcaacaaacgacatttctttcgtctgcggcaccgtaatgtgaaaaaactgctggatttttccggctccgtccagctgcgccgattcatataattcagcgggaatgctctgaatcgagacaatgtacagcatggcgatgtaaccgacagactgccattgagacacaaaaatgacagacagcatagcggtgttttcatcgcccagccacgcgcgggtcagttcatcaagtccgacggcttccagcagctgattcaaaagcccgatttccgggttataaataaaatcaaacaacagcgcaatgacggtcatggaaatgacgaccggaagaaaaaagaccgtgcggaaaaacggcgaccattttcttaccagtctgtcttccagcacggccgccagaattaagccgccgccaacctggcaaatcagcgatatgaccgcatacagcacattgttgcggagcgctgtaaaaaacacgggatcgtgaaacaggtcaatataatttttcaaaccgataaacgtcttttcgggttgaaatgagctccattcaaacagactgaaaaacacattctcaataatcggaatgtaaacgaacagcagaaaaatcagcgcgggcgcgagaaacagatacggaatgaaacgttttcggctgaccaaggaaatcctcatcacctttctccaaagaaatctgttctattcagatgacgctttgacttgacgcgccgctttctgcacggaattcatcacctcgcgcggtgtcattgtgccgccgagcatctgctgaacgcctgccgcatacacatcggcgatttcaacgtcaacatccatatcaaaccacggcaccattgtttcggcgcggacgatatcctgcacggcttcacgctggatcggggcggaattgttttctgtcgccgttccttgaaccgcgctgtatttaccgacgtcttttatcagcttctctcccatttttttcgaggttaaaaactgaagaaattccatggcttctttcgggtgcttcgtttttgaggaaatcataaatccttccggagatccggtcagtgcacggggagatcccttttcgccgctgattttcgggaaaggaaacaagcccagattgaccggttcgacgagcttaatttctgccgtttccgcataaatcatcgccgctttgccgctcgtaaactgctggcgcacgtattcgtgatcgacggagttcacgtgctttgtaaagtacggcagaagttcctgaagcttttcaagcgctttgacatagccttcgtccgtaaactccccggtttccgggctgtaatccttcgcccgcgttttttcatccaccatacgctggttcagcgtcccgatataatgagaaatggtccaaggcgcttttgtgccgaaactgatcggaatatatccgttctctttcaatttctcagagactgtgatcagttcatcccatgtcgccgggggcttcaaatgtaatgtattaaaaatgtccttattataaaagaatgatttagcgtccatttgccacggaacaccgtactgttttccgtcatgcgtaaagggtttgatttgtgactgcacaagctgagaggaccaatctttatcctgctgatagtaagacgacagatcgagggctttatctcctttgatgaatttataagcaaaccggtcgctccatgaaaagaaaatatcaggggggctcgttgttccgagcatgactttcaccttgtctttataagaatcgtttaagaccgcttccgtttggatatgaatatccggatgagcggcttcaaattctttgaccgcttcttcaaaatagcttttttcaggctccttcggccacctgtgaaaaaacttcaaggtcacttttccgtcagaggaactgctttggcttgaacaggcggcggctgacagacatacggctaacagaacgaacaggcagatgagctttttcagatgcttttcctcctttgtcaccggactataacgttatatatcattatagtccagtgaaatataatgcgcgttcttaatattcgactttccacatgtaacgccgctggcttaacggatggttccttgcttccgccagcgcatccgcatagcttctgagcacccggtttaatacgagaggagccagatagccttttacagaatcgtcaattccggaaaaatcatatgctgccgcatcaagcacagtcagttttttgccgtatctttttgagaaggaaagcgcccgctcttcaaggggtcttgtttcgtctaagccgagcaggataataaatggaacggattcatcaatgatttcgaacggtccgtgaaaatattctccggcatgaatggcgtgggaatgaatccattgcatttccatgagaatgcagatgctgtaggagtaagcgacgccgtagttcgcaccgcttgccatcgtgtaaatgatatcttctttttcgtgggctttcgcgaatgcctttgcgtgatccgcttcttgtttaagcgctttgtcatatacggtctggagcttattgagtccgtcgatcgccggctcaaacgcgggatggttttccagcacgtgtaaagcgccgaacacgatttgatacagaaccccgtaattcgtatttatcgcctgtgcgttctcaccccagtcatacaccgcgacatattcggcttctttcgctagcggcgaatcaggctcaaaggtcatcgcaatcgtaagcgcgcctttttttctggcgaaaccggcggctttcaccgtttccggcgtattgcctgactgagaacataaaatcacgagagagttctctccgagctgaacgggattgcgctgaataaattcatttgaactgtagagatcagagctgatggctttcgcctctctgtcaaacacgtacttgctcggatacataatggctgaagaacccccgcaagcgacgaaaaagacgtggtcaatcgtttttcctttcagatcatccaagaaagcctgaaccttgtgattcacttgtgcggcagtttgactcaaatccttcactcctcagtgttttattatataacgttatataacattatataacgttatattaatcgcaacaaaggtgcgttgtcaatcatattttctgaaatttctaaaatataaaataaacccggcttatttcccgccctctcttgacctgacccttagagacacgtttagaatgaaaaacagggagtgattcagaatgaatataaaagaagccgccaggcagacgggtctcacgaaaaaagccatcaaatattatgagcaggaaggtttaatcaccgtcagcaaaaaccctgataacggataccgtgagtattccgctcagaacgtgaatacgctgaaaatgattgccgccctccgaatgctggcactgtctgtaagcgatattaaagcgttcctcttagagggcagcagtctgcatgatatactgcgccggcagcatcaaaagctcagccggcagattgaagagcttgagcaggaacggaaactgactgaaatgctgatcaagcgcgtggaagatgcggaaaatgtcgattcaattctgcatgatatcggcgaggtcaaaatagatgaaccgaagtatatgggacttcagctgaaaaaactgttcccgggagatttcggagaatttatcgccgcgctgtttgaaccgttcctcgacttttctattgatacagatgagaaaaaaacgatatgggcggagcttattaaagtattggatgatatggaagaagttccggctgcacacccgatgatgcagctggtcggcaaggaggatccggctcagctccagcagcacaaagtccagcatgatcaatttatcgagcggattttagagagagaccccgccacttgggacactcataaaaacatcatcattcagcttgtgaaaagagtgcagacagatgaagaatacagggaaagcctgatcaaggtcggagaatcagcttctgatctgcccgcgctgaaggagggatcgcctttcagcaatcttcttcaaaagctcagcccgaaatatgacacgtacgtgcgacttcagcttgaactgaaaaaagaagccgacgaggaactcggctttgattcagaagcatatttaaaacagatgcttcaatcaaaaaaacgctaaggttcgtctccttagcgttttctttcttcagcctcagtgctgcgcgttaatgcggtcaacgacattagcgatgagctgctcttttcctaagtcggaatcttcgtcaacgcttgctactgtcaaaatgatggccgctaccgcaagagcgatcgtctcaatggcggccgccgcgtttaaaaatacccatacagccgttgcgcattggccgatggccgttgattttcctttgtccatgctctttttgtcaaactcttctttcagcactttcgccataatctgcgaaccttgatcaatgacgctgttcactttctcataatcgccgctgtagaccgccgctttcaactctttaaaataattcggcgatgactttttaatatcagcgatcacctgatcggaaacttgcttcaattcatcctgatcaatctttttgacagccttggtatcccatacttcaggaaggagctttgcgacctcaccttgtccgaaaaagatgccggaaaaaatgtcttcacccgaataagagacggatggctcagttttcgccgcggcatgcgggccgactaatgcgaccattaaaacaaacaccagcatcatggcagctgcggacttcttgctcttaaccatataatttcctccttttccttttattgaaaaaattgtatctgataaaaaggggattgtaatggttcaaagctactgttttctctgccggcaccaaaaacaggaccaaaataccagccaccgtaatggaaaacgaggtaagccccagcataacggcaaagatttcgtgcataaaaatggagataaacaatatcagacgccaatatgttttcggagcaaacaaagcgcagaacataatggtttgcacaatgagcgtgccccacgtcgggatgatgacaagcttggactgcaggataaagtcaaacagaccgtgaagcgcatccggcagacccagcatcggatcgttcaaatagtaataaacggcagttccgttctgccactcttcttccatcagtttagcaatgacggagttaaaatacagcattgcgacctgtattctgatgattgtcagcgtcgcccagcacaaggagcggtaataaggctcaagcggccttttctcaaaagacgcctcgtacggagaccagtgccatttccgcggatcggttaatgtcagcgggagcagcagcagtgtaaaaacggcagccacctgatctcctccgtcaagggtaacggcggagttttggaagctgtacgaaatccaccagtgaaaaaaaccggtgattcgcggccgccagccaatgacgacaaggattaacatacagatacaaacggctttgacgatctcaatgtaacggaaatcgggaaacagcagaaacaggctgaacgtgtcggaaaaactgagcatttgattttgcgttttgaagaagacagacgccggattgaacagcaatgtcagcagcgtgccgagcgcgattaagcttctggcaagcccgtacacatttgtccaaggcggattcttcatcatccataaggtgagctgcttttttgcatcctgaatcaattgacatccactccgatgtattttttgatggttcttttcgtttcggtatgttggctccatgcccatggggtaatgcgttcatatgtaatgatcattttccctttcagccttggggagggagactcatttttcattttcaaaaatgtggtatccttaatgtcttggccagtcgtgaagtcgttccacttctctttggaaggcagcttttccagcataaggccgagctctatcccttgcgtccggccgtagcggtttaagccgatgacatttttcagagaattattcggccatctgagctcctcatcggcatcaagaagatagatgttcaagctgtcttctctcggatctttactgaaaaatccccagctttgcggataaatcatggaaacggttttggattgatgcttggttaattggatggcggagcttggcaatgccgcgatgatggtaaaaaacaaaacgatgatccaggcggccatgataaaaagaaagaatgaaaacatgctggtttgcttcttgtcagtcaattgaaaccctcctagcgtatggaaatttcattgacatgattatacaccattcaacaagtaaaatattgataaattagatttttcagactaatatactattatatgtaaaaaagggagtgttcatatgtttttgatgaatgataaagtgctgtggggagctgtggttctcgcctttattctatcgattgtgttttatccgtttcttcctgctgatatggccattcactatgacgtgtcgaaccgtccgaatacatcaatcaataaaacggccggcgtcctgatttttcccgtgctcatgatgatctgcatgttattcagaaaaaaggtcgtccagctattcctcatcgtttactgtctgctgatcgtgcatattgcagtgatgtggctggcactgtaaacataaagaaaaccggagcccttaagctccggtttttcttatttataaaatactttctcaatgttgtatttcgactgaagggtattgatcgcgtacgtttcgtaaatctccctttccatcggatcatttacgacacatacttcaattttatacacttcgtctctgtgatgtttaacaggcgacacattgtcttcaaaatgctttttgattctttgtcttaatttacgggctttcccgacaaacagcagctcatcatgaatgttataaaacataaagatgccgcctttgtctctcggaatttggtgaaaatcaatgaaaccgtaaatcgctttaatcgccggttcattctccgacggtgactgctgccgttccgtaatggttacatcaggagcaggaaggtttatttttatcaaatgggtcacgtcctcttattcattaaagctccatcctatcataagaatgcgccaaaagctattttttattcaagcgccccggccggatcataaaggcttaaatcaatttccgtctgctgcccgagcgcgagtttcgccagttcagcccccagatacggcccgctcgtcagtcctgaggcgcccagcccgttggcaacgaggagtccgctgatattcggcactttgccgatgacgggaagaaaaccgggagtaaacggcctgaaaccgactcttgtctctattacagtactgtctgaaagccccggcgccacggttaatgctttgtcaaaaatctcgcggagaccgccggccgtcacccgcaaatccatgccggtatcgttttcatgagtcgcgcccgctatgattctgccgctgtcaaaggcgagaatatattgatcgtttgggggcatgacgacgggccagccgcccgtctcctctccctgaagctctaaatgaacgatctgcgccttttggtatgatactgaaaaacggatgccgagcggctcaagcagctctctcgcccaagcgccggccgttacgagaacctggtcggcagtaagcgtgcgttctgcggttttcacaccaatgacggcaccgtcctctgtcaatattgacgcttcttcattgtaaaccgccgcgccgtgcttaacggccgcgtttaacagcgccttacgaagcgccctcccgttcacccgggccgcgccgctgacataaaccgctccgtattcctccgacagcgcggggaacagcgccttcgtttctgccggagtcagtcttgtaatgtcaccgatttcagaggcgtcctctcttcttttataagctctttcctccatttggctgagctttttttcatccgtatggaggctgacggcaccgaccttttgataaccggtttctgtttctccgtcagcttcaagctgctgtatcaatcgttcataataacgggctccgccttttgcgatcgcataccatgcctgattgcggcgctgtgacagccacgggcagacgatccccgccgcggcgtcagtcgcctgccccaggtgcttccggtcaatgaccgttacatccgccccggcctttgcgagatgataagccgcggacgcaccgagaatgccggccccgataatcaaataagacttcatgtataacaccttttctatctgttttgtcttatttattttaacaaatggagcgcccggttcctaccggagtcctgacggcaatgatgagtttcgaaaacggaaacgtataataaaaggaatacgttcttgtctgaaagccgttttcctcaagaattgctctgtattgtgatgtattttttatatctgacacggccaatgtgccgccaggcttcagcaccctcaccatttccgcaatcgcccgttccctcttttttctgcctgaaatgttgtgtacggtaaaatgcgaaatgacaaggtcaaacgtctcatcaggaaacggcatgtcttgcgccagtccatcatacagatcaatttccggcgctctttcagcctgtctgttcttttcaaatgcgtctcttccgtttccgaccagatcccagctcgaccatttgtcaatcgctgagacgtcagcgcctttttgagccgcggcgatggctaatagcccccgccccgtaccgacatcaagcaccttcatgtccggctttaaaccggaaagcgaaagaatgcgatggcggtgtaaaagtttaatggccgttgaatacaagagcatccaaagaccgagcaataaaaacaaggtgcccgtcagccagccccagtaaggaggaatcatgccgcataacgtggctgcggcataaaggagcgcaataaagataaatccaaacgctccataaggcgcatcaattccgtatcgtgttgtcataacacccacccctttcaatatttatccaaatggtataccatattattctagcaaaagccgaaaggagatacgaccatatgaaacgcggcattacatttaacatcccaaatcaattcggacggtttgcggcagatatatgacaacagttccccatctcttcctatacgtggtttatcggtgatggagaggcgtatactgaattcaaagaagacaccgatacagacctgtttccgcaaaatcagcgcatcattcagggtcaagaactccgtcagcgtctggaaggaaacccttattatatgatttttgctgaattgaaagctttcccgggcgggatggtaacggaaatcaatacgtacgaggagtatttggagagttcctgtgagcttgtgcttctcattgcagattgctcgtatgtaacgttatattgcaaagatccggatatgctcgaagccctttatcagcaggctgtacaatgcggatttctccgcgttgactatgttacagatgagaatgatgcgagaacgggattgtctgtctgatgaaggtgcgttctttttatgaagcgcctgatagggcttaggattcaaaatattgacaaattcgtgtgttttcaacaaaaaaacaaccccctcatgtatactgagtgcgtaacttacatatgaaaggggtatggcaatgaaaatcagcttgaagaaaaaagcagatttttggaagaagacggcggtttcgtcacttattttcaccatgttttttaccctgatgatgagcggtacggttttagcggccgggctgaataaggatcagaagcgccgggcggaacagctgaccagcatctttgaaaacggaaagacggaaatccaatacggatatgttgaagcgttggatgacggaagaggttacacttgcgggcgggccggctttacgacggctaccggagatgcgctggaagtagtcgaagtatacacgaaagcggtgccgaataacaaattgaaaaagtatttgcctgaattgcggcgtcttgcgaaggacgaaagcgatgacatcagcaatctgaaaggattcgcttctgcctggcgctcacttggcaatgataaagccttccgcgctgcccaggataaggtaaatgacagcttgtattatcagccggcgatgaaacgttcagaaaatgccggactgaaaacggccttggcaaaagcagtgatgtacgatacggtgattcagcatggcgacggcgatgatccggactccttttatgccctgattaaacgcacgaacaaaaaaatgggcgggtcaccgaaagacggaactgacgagaagaaatggctcaataaattcttggatgtgcgctatgacgatctgatgaatccgtcagatgaggacactcaggacgaatggagagaatcggttgcccgtgtcgacgttttccgcgatattgtcaaagagaagaactacaatttaaacgggccgattcatgtccggtcaagcgaatacggtaatttcactattcaataaacaaaaaaaccccgccatatggcggggttttactattaaccgatggagccttccatttcgaatttaatcaaacggttcatttcaactgcgtattccatcgggagttcttttgtgaacggctcgatgaagcccataacgatcatttctgttgcttcttcttcagaaataccgcggctcatcaagtagaaaagctgttcttcagaaacttttgatactttcgcttcgtgctccaatgaaatgttgtcgttcaggatttcattgtaagggattgtatcagaagttgatttgttatccataatgagcgtatcacactcgatgtttgaacgggcgccgtccgctttccgtccgaagtggacgataccgcggtatgttacttttccgccctgtttcgaaatcgattttgatacgattgtggatgacgtattcggtgcaaggtgaatcattttcgcgcctgcgtcctgatgctgtcctttacccgcaagagcgatagaaagcgtcattccgcgcgcgccttcacctttcagaatgacagccggatatttcatcgtcaatttagaaccgatgtttccgtcaacccattccatcgtcgcgttttcttcacaaaccgtacgtttcgttactaggttgtaaacgttgttcgcccagttttgaattgttgtataacggcagtagccgccttttttgacgatgatttcaacaaccgcactgtgaagcgagtttgttgtgtacacaggagccgtacagccctctacgtaatgaacgcttgcttcttcgtcaacgatgatcagcgtacgttcgaactgacccatgttttcagagttgatgcggaagtaagcttgaagcggtgtttcaaccttcacgcctttaggcacgtagatgaaagatccgccggaccaaacagctgagttcagcgccgcaaacttgttatcagtcggcggaatgactttcgcccagtgctcgcggaaaatgtcttcattttctttcagcgcgctgtctgtgtctttgaagacgatgccttgctcttcaagatcttctttcatattgtggtaaacaacttcggattcgtactgtgcagaaacaccggcaaggtatttttgctcagcttcaggaataccgagtttgtcgaatgtctgtttaatttcctcaggcacttcatcccaagaacgctctgaacgctcagacggctttacgtaatacgtaatttcgtcaaagtttaaagagtttaaatccccgccccactgcggcatcggcatgttgtagaaatgctcaagagatttcaggcggaaatcaagcatccattgaggctcttctttcatgcgtgaaatttcttctacgatttcttttgtcaatccgcgctctgaacggaaaatggaaacgtccttatcgtgaaaaccgtacttgtattcaccaatttcaggcatttttttagccatccattttcactccaatcttttaattgccgcctttttcgccagcgactcctttttcaagtgctttccatgaaagggtggcacatttaatccgggccgggaatttcgaaacgccttgaagagcttcaatatccccgagatctatcgagtcgtcatactctttcccttgcatcatgtctgagaaaatcttagacatagaaagggcggtatcaatatcttttcctttaatcgcctgcgtcatcatggaagctgaagccatggagatagaacagccttccccttcaaacttcgcttcctgaacggtatcgccgtcaagcttcattgtcagtctgatccggtcgccgcaagtcgggttgttcatatcgacgacgatgctgtcatccaaaacccctttgttgcgcggatttttgtaatgatccatgatcacttgtctgtataatgtatctaaatttgcattaaaagacatttgtaaagtactcctttgtcttttggagggcttccgcgagcttatcgatctcttcctctgtattatacagataaaaactcgctctcgcagtggcagatacatccagccatttcatgagcggctgggcgcaatgatgtccggctctgaccgcaatgccctcagcatcgaggacagtcgcgacatcatgagggtgaacctcatcaagattaaatgtcacaagtcccgcccgctctttcggaccgtataccgtcacgccgtctagctgctcgaaacggtcaagcgcataggctgcaagcttatgctcatgccgggaaatctcgtcgagtccgatctcttcaaggaaatcaatcgcggctcccaatccgatcgcgcctgcgataatcggcgtgcctgcttcaaatttccacggaagctctttccaagttgattcataaagccctacaaagtcgatcatctcgccgccaaattcggccggctccatattctcaagcagttctttcttgccgtacagcacgccgattcccgtcgggccgcacattttatgggaagaaagcgcgaagaagtcgcaatccaagtcctgaacgtcgattttcatgtgcggtgtgctttgcgccccgtctaccacgatgaccgcgccattgtcatgagcgattttggcgatctctttaatcgggttgatcgtgccgagcacgtttgacacatgagcgactgccacgatcttcgtatggcttgtgacagtctgccggacgtcgtctaacgaaagcgtgccgtcttcctgcattgggatatattttaaagtcgcgccggttgcttttactgcctgctgccacggaatgatattcgcatgatgctccatttgggtgatgaccacttcatcaccgggttttaagctggcgcgggcatagctcagcgccaccatattcagtgaagttgtcgtgccttttgtgaaaatgacctcagccattgacttcgcattgataaacttacggactttttcacgcgcaccttcatagccgtctgtcgctctcgtgccaagagtatgaacgcctctgtggacattggaattgtatttgctgtaatactgatccactgcttcaatgacagcacgcggcttctgggaagtcgccgcgctgtcaaggtacacgaggtcatgtccgttcacttgctgatgaaggatcgggaactgttcacgaatatcggtgatattcattattttactttcctttcgatgacggagacgagctgtttcttaactccttcaatcggaagctcttttaccaccggagcaaggaatccgtagatgactaagcgctccgcttcttctttcggaattccgcggctcattaagtagtaaagctggatcgggtccacacggccgacagatgccgcatgtcctgcagttacatcgtcttcatcaattaaaagaatcgggtttgcatctccgcgtgctttttcactcagcatcagaacgcgggattcctgttcagcgtttgctttagacgcgccgtgctcgattttgccgattccgttaaagatggaagatgcggcatctttcatgactccgtgcttcaggatatagccttcagaagccttaccgaagtggatgatctgcgtcgtaaagttttccgtctgttctcctcttccgacaactacggttttcgtatcgccgtatgtgccgtctccgtagaggtttgtcgtgttttcagaaatcgtgtcgccgtcgttcatcagtccgagcgcccactcgattctgctgtcgcgtccgcgcgcggctccgcggcggttgacgtatgtcgtgacgcctgctgacaggttgtcaacggcgccgtacgtcacgctggcattatcacctgtgaccacttcactgataatgttgaatacagcttctttcggattcaccgtgctgatgtagttctcaacgtaagtgacggagctgtggtcttcagcgacgatcagcacgtggttgaacaatgccgtgtcattgctttcatgaacgtaaacggcctgaacaggcgtctccacctgaacgtttttaggaacataaaggaatgccccgccgttcattaatgctgcatgaagcgcagtcagtttatgttcgtcgaccttaacgccgtctttcatgaaatacttctcaacgaggtcgctgtgctcacgagcagccgttaagatgtccgtaaagatgacgcctttgtctttcaattctttagaaagagaaaggaaagcgggcgtttggtcacgctgcacgtataacgttttgtcttcgttttcgatatcgatcagcgcttttgcttcatcagctaaatcttctaaagaagcaagcggcgcattttctactgtatgcttgttgaactttgtaaagttccaatttgtgatttttgttttatcaggcttaggcagcggcagatcgtcagctttttcaagagcctgtaagcgcaggtttttcagccaggcaggttcttgatgcttttcggaaaagcctttgacatattcctgatctacggatagtttcgtttccaatgtcatgattatccccctaacgcttacgcttcttggcctacagtttcgtcttcaatgcctagttcttgtttaatccagtcataaccttccgcttcaaggcgctgtgcaagctccgcgccgccggatttcactacgcgtccctgcatcataacgtgaacgacatcaggcgtaatgtagttcagaaggcgctggtagtgagtgatcattaagcagccgaagttttcgctgcgcattctgttgattcctttagaaacgactttaagtgcatcgatatcaagacctgaatcaatctcgtcaagaatggcgattttcggctcgatcatcataagctgaagaatttcgttgcgttttttctccccgcctgagaaaccttcgttcaggtaacgctgcgccatttcagggtccatttcaaggaactccatgttttcgtccattttgcggatgaatttcataagagaaatttcatcgccttcttcacggcgtgcgttaatcgcagagcgaaggaaatcggcatttgtcacaccgctgatttcgcttgggtactgcatcgcaaggaaaagacccgcctgagcgcgctcgtccacttccatttccagtacatccttgccgtcaagcgtgatgctgccttttgtaacttcgtatttcgggtgtcccataatcgctgctgaaagcgtggatttaccggtaccgttcggccccatgacagcgtggaattcgccgccttttatttcaaggtttacaccttttaagatctcttttccttcgatttcaacgtgaagatccttgatcgttaatgttgaagcagccatatctatacctccaaaatatataatcattattctcaatttattctcattctaattttataacaaatgaaaagtaaatacaactttttatattacccggaacattcctaaagtttatcaaagatcaaggcgtaattaaagctgtttgaaacagaaaaagggcggaaatccacccttttttactgaccgattttctcattaagctgcgctgcgaggaacttgcttttttgatattcaagctccctctgccgttcgacttccatcctttttgaaagacgccgtccgtattcctcgtagccgatgccgtgtgacttctgcatcgctttttccatttcaggcgtatagtcaaggtccagtctctcgtggctggtgcagataatgaatcaatcccttcatctatttgtttctattgtaacaatgatccgctgctccggccaaagagagtgtgcccctgaatcctttcgaatgtgccggaatccggcgctcgctttatctgaaaaacggtattcacacgattgctctttctaatgcgtcgtatgtccgaattcctgaatacactgctgcacgagggtcactccctgactgagagccgcaccgcccccgaatgccgccgcgacgccgatgacctcaagaatgttttcttctgtcgccccttggtcaaggcagcccttcgtatgataaatcatgcaaaattcatcttgagcgctgatgctgatgcccagagcgattaattgtttctctttttcagttaatgaatccgctgagaaacactgttcagtaaattcattaaacttccgccccatcatcggcattttttgctcgaatatgcctaaaccttctttatattgtttcaatgcgtcatgcacgctttttccattatcctggtattgagccactgccattccctccaataagttaaccttcctttttattatggacagttctctgattaatacccgaaaaaaaccccggatgattcatccggggtttttgctttattcagatacgggaagcacggctccgtcgtattttttctcaataaagtctttgattttcttagagtgaagcacttccataagcgctttgattttctctgatttttcgtcacctttgcgtacggcgatgatgtttgcgtacgggttgtttttcgttgattccacttgaatcgcatcttttaacggattcagtttgttttgaatcgcatagttgacgttaatgaagactgcatcgccttcttcttcattatatgctttcgccgttaattcaggggcgatttttttgaatgtcaggtttttcgggtttttcgtaatgtttttcgtagtggcttcaatcgtttttaccttcggatcaagtgtgatcagtccggctttttcaagcatcgccagcatacggccttgttcagcgacattgttagtcatgatgatggtcgcgcctttaggcaggtctttcagtgatttgtattttttcgtgtaaattccgaatggctcaaggtgaacggctccggcattcacgagtttgtaatctttattttctttcatttcctgttcaaggtaaggaacgtgctggaagtagttcgcatccacttcattatcagctaacgctttgttgtacattttgtaatcgttcagcacttttacttttaatgtgtagcctttttccttcaagagcggttccgcttcttttaagatttcagcatgcggtgtttttgtcgcggcgacgacgatttcctttttatttgagccgtttgatccgcaggcggccaaaactcccgcgaacacaagcagcagcgcacttaatacaatctttttcaatgtaaatcctcccttatcttttgtctattatatttgtaatcacatcaccgataatctgaatgataaagacgatgatgagtataaatactgtcgctacaaacgttacatccgtattattggactggtagccttctacatatgcaaggtttccgagtccgcctgaaccgatggcgccggcaatggcggtagatccgatcagggcgatggctgtaacggtgatgcctgaaattaaagcaggcattgattcaggaatcagcactttgaagataatcgtcgatgtctttgctcccattgatctggcagcttcgatgactcctttatcgacttcccggagcgcaatttccgcaagacgggcgtaaaacggcgcggagccgataatcagcgccggcaatgcggcgttcggtcctaaaatcgatccgaccaaaatcttagtaaagccgagaagcagaataattaaaataagaaacggaatagacctgaaaatattaacgaccgccgcaatcacggtgttaatgattttattttcccataagcttcccttgcccgttaaaaagagcagaagaccgagaatcgctccgatgacaaatgaaaaaactaatgcgatgaccgtcatataaagggtctcgtatgtggccgtccacagctcggttatatcaacgttcgggaaccatttttcaaacatttgtgatcacctctgcttctacctgtttgtctttgatgaaccggatcacgttttctacttctttttcctgaccgtcaatatgaatgaataaagaaccgtaggctccgtccttcgtctgtgaaattttcccctgcagaatattgacgtccacatcaaagtttcggatcatttccgtaatgaggggctgctcagcggcctgcccgacaaatgaaagctgaatcgtttttcctgtcgctgtttcctgcagaaaatgctggatggtttctttcgtctcctccggttctgtcacctgctgaacgaaacgcttggtcatcggttcgcgcgggtttctgaaaacttggagtacttcgccttcttcaacgactttcccgttttccatgacggcgactctgttgcagattttacggatgacgtgcatttcatgggtaatgagcacgatcgtcagaccgagtctgtcatttatatcggataaaagatccaaaattgaatcggtcgtctgcggatcaagcgctgatgtcgcttcatcgcacagaaggactttcggattattggcgagcgcccgggcgatgccgacacgctgcttttgaccgccgctcagctgcgacggataagatttttctttcccctctaatccgaccagtttaatcaattcatcagcgcggcggacccgttcgctttttttcacgcctgcgatttccagcgggaacataatgttctcccgaacggtgcgcgaccacagaaggttaaaatgctggaagatcatgctgatttcctggcgcgcttttctcagcccgcggctgcttactttatttaattccgtccccgcgacttccacggttcccgacgtcggcttttcaaggccgttcaggagacggattaaggaacttttaccagctccgctatatcctataattccaaatatttcgccctttttgatatcaagagtgacatcttggacagcattgacatccccatgcttcgctttgtaaatttttgaaacattttgaagatggatcaaagcaatcacccgccttacactattctaagaaatcttccgggtttctccgcaaaagaaaagcctttctgcaaaaatgagcagaaaggcttattgaaaaaggcctttctctcatctttcaaagcagaccgcttcgagtgaattggcaccatttcaacattgttgatggttgccgggcttcatagggcacttccctccacctctcttgataagagaaaacatatcgtattttcgtccggaaattcttactgtagaatagcacggcgaatgataaaaagtcaataaaataaatattggaagctattgtcacatagtagattggcagttacggccgtttactgatcgcctgaaaaaatccgtttgtcagccagaggatggcctccagcttcagcagagctctgaatgatcctttcactttgagttttccgctttggataagcttttgcaaagagacatcaccatgcaggagatggatgatttccgtctggtttccgtaaaaggtcaaattagatttttcctttgaaaccgacgtttttctcatttctccctgtccgttaattgagaccgttaaggcttctgtttctccttggaatgtaatcagcagcgttgaggcgtttaatagcggtttcaaaaacagatgctgtccgtcattctctgaaacttctattttctccactcgtataacctcccgttttaatggccatacatacactttctctttttaacggacagaaccctttataaaccgcacgacattttcctgtaaatattgtcacatcgggaacgtttgcgatgttttttgtttaatcagctcatataaataggaaacggagcggaaggcgtatcctttctcaacaagctctccgcctttaaacagcaaaaagcacggaacgctttcaatctgataggctttggcgaatgcgggggaataattcacgttgtttttatagaaggcggcgccgggcagcatttcttcgacgacagtaagcattttggacgccagctggcatgtgccgcaaaacggggtgtacaaatacaggagataaacgtcatcctgaatcgattcgagttcattttcttggagttctttcatgtttaccacctcaggtcgttctttttcaaaaatacagtgtcagcatcaaagccggctctgatcagcacagatgcgagatgatggcccgggcacgactcgacttgcctgtatgttctgtctatataaatatggcgcgcttcgggaagctcccgtttcagctgttttcttaatttttctccggagtcatctgcgtccgttaaaatatagacgtctctgtcaaacaggcggtccgccaaatcttccagttcggtttggccgatcgtcccgtttgtacagatgatttccgcgggttcgatgagcacttccctgactttgattttatcagattttccttctacgataatgaccttttcatctccgttgtacataagcgcgtcacctgccgattgttttagcgtcagattgaaaaagaaggcagtgaaattcaccgccaactgttaacaccagccattctcataatcgcaatcgacatatttcggatcgctgccgtttatgacatcggctgttttataaaatttttgattttcaaatgaaaagccctgtttgagctcgtactggtccatgcctgtcatctcgccgatggcttcattttcatgaaataaggaaaaccggccgttttgaaagcggcccgtaacgttctccgtcacatcgaccttttgtttatcaaaagccattttagacacctcccgttacagatagaatgtccaaatggcccctttgctatccgatcagtcttcctgtgtcatttcgtcatattgctcggaagtcatgaggttttcgatttcttcagcatcagccggttccacgacgatcatccacgctttttcatacggagactcgtttacgaattcaggactgtcatcaaggtcttcgttcacttccgtcaccgttccgttaatcggtgcgtacagttcggaaacggttttgacggattccacgctgccgaatggctcgtccgctttaatttcggcgccgacttccggaagctcgacaaagacgatgtcgccaagttcggcttgcgcgaaatgtgtaatcccgatgcgggcttttccgtcctcaactttgacccattcgtgctctttggaataacgcatatctttcggtgtgctcatctaaatccctccatttttttcttataataagaagataccataattctttgaacctggcattacatccaatatttttcgaattggtcttctttaaagccgacagtgactttttcgccgtctgtcgtaatcgggcgtttcaggagcataccgtctgatgccaggagttcgagctgttcatcctctgacatatggtacagtttttcctttaagttcagctcgcggtatttcattccgctcgtgttgaaaaactttttgagctcaagaccgctcttttcatagaggtctttaatttcttctttcgacggagtttcctccgcgatatgtatttcgtttatttccttaccgcggtcttccagccattttttcgcattacggcacgttccgcatttagggtaccagtaaaaatttaacgacatcttcttcaccccttgtaaatgatcgtcgttattttaacacaatcacttgtaaaaacctataacgttgcttcatgaaaaagcgcccctgatgaaggagcgctttcagcatgtgatcagaccgtatatttttcttcacggaagacggcggctgccgcttcacgttttttctgaatgaggtttttcggcgtcaggcgcgtcagtttgcgcagcacggaaagcatcatccggagggaatctccttcctccatggcgatcagtgattctttggcgtgcgcttcaatgttctgaagggcttcctgggcaaagatttccgtatataacagcttctgcgcggctttttcggcaccgtccgccgcaattgctttttccgttctgaggacggctgattccaaagcgtacagcgcgctgacaatatcggcaatgttcaccatgatttcctgctcgccttcgatctctttgccgtatttctgcgccgcgagacccgctgtcaagagggcgatctttttcgcctgtctgacaatgtatttttcctgttcaagaggttctgagcccggctcttcaggcatcagcatcatgagttcttcttggagcgcttttgctttttcaaagagcggcagctgaccttttacggcttttttcaggaacgtgctcgtgacgatcaggcggttgatttcatttgtgccttcaaaaattctgttgattcttgagtcgcgataagcgcgctccacttcatattcctgcataaatccgtaaccgccgtgaatttgaacgccttcgtcggcaatataatcaagcgtttcagaaccgcacattttgttgagcgagcattcaatcgcgtactcggcgattgacttcgcgacttcgcgtccgtctttttgctcctcttccgtcagtctgctcatattatcttcgaataagcccactgttctgtatacagagctctccatcgcgtaaagccgagctgacatcgtcgcaagcttttcctgagtgagcgtgaagcttgagatcggcgttttaaattgccggcgctggttcgcataagcggcagacagctcaatcacccgttttgaagcgccgattgtgccgacggcaagcttgtagcgcccgatattcagaatattaaaggcgatgacatgtccttttccgatttcgccgagaaggttttctttcgggacttccgcctgatctaaaatcagcgttcttgtcgatgaacccttaatccccatttttttctcttccgggcccgttgacacgcccggatagttcttttctacgataaatgcggaaaatttatctccgtccactttagcgtagacgacaaagacatctgcaaaggcggagtttgtaatccattgcttttctccgttaagaatatagtgtgtgcccgcttcattcaaaacagccgtggttttcgcgccgagggcatctgaacctgaaccgggctcagttaaggcgtatgccgcgattctttgtcctgaagccaagtccggcaaataggtttttttctgttcttccgttccgaagaacacgatcggcaatgagccgatcccgacgtgggcgccgtaagacagcgaaaagctgccggcacgtgaaaacttttccgtaatgaaagctgaactgattttatccaggccgattccgccgtactcttcaggcacgtctgctccgaggaggccgagatctccggcttttttcagcagtctgaccgaatgctcgaactgatgattttcaatttcatcgatataaggaagcacatcgtttacgacatagtcttctgtcgttttgccgatcattttgtgttcgtctgtaaagtcctccggagtgaatatttgatcatatcccgtctcttcaatcagaaagctgccgccttttttgacgttgaccgtttcctgtttcatgttcgtttccccctttttttaaatgagttcaaatacgccggcagctcccatgccgcctccgatgcacatcgtcaccacgccgaattgctcgtttctccgtttcatttcatgaatgagtgacagggtcagcttcgttcccgtgcatccgagcggatgtccgagcgcgatggcgcctccgttgacgttcactttttcttcatctatcccaagcgatctgatgacttgaatggcctgtgaagcaaaggcctcattcaattcaaaaagcccgatatcctgcaattcgagtccggcaagcttgagcgcccgcgggatggcttcaatcggaccgatccccattacctcaggcggaacgccccctacggcaaaggaacggaatttgacaagcggcgccaatccgagcgacgaagctttttcgcgatccatcagcatgacagccgccgcgccgtcacttgtttgtgaagagttcccggccgtcacggtccccgttttagaaaaagccggacggagcttcgccaagacgtcagccgatgtgccgggacgaacgccttcatcttgagaaaagataaattgttttttccgcggcttatggtcatcaccgacttctgtcagcgatacttcaaccggcacgatttcgtcattgaatttcccttctttaagggcttttgcggcattctgatggctgcggacggcaaatgcatcctggtcttctctggatacgccgtacgtttcggcgacctgctccgctgtgtgccccatgctcatgtaatactcaggcgcatgctccgccaaagcgatattcgggcgggtcacatgtcccatcatcggaacttgcgacatggattccgcaccgcccgcaatgacggtgtcacccgcgccgatcataattttttcagcaccgtaagcgatggattggagcccggaagagcagtagcggttcaccgtaatggccggcaccgtatgaggaagccccgccagcgcaccgatattccgcgccatatttaatccttgttcggcttcaggtgttgcacagccgataattaagtcatcgatatttccttcatagccgcctgcccgtttcagcgtttcttttacacaaagcgcacctaaatcatcaggacgaacggctgcaagcgatccttttttcgctttaccgaccggggttctcgcaccggccacaatgactgcttctctcataaacaccctcctagttccgtaaaggtttgcctttgacgagcatatgctgcattctcgcttgagatttcgcctcgccagcgaggcttaaaaaggcttctctttcaatctcaagtaaatattcttctgaaacctccgtgccgaacgggactcttccgccggcaatgacatgggccagcttcttcgcaatcttcatatcgtgatcggataaataacccgaccgtctcatttggtctgctccgagcagtaatgccgcacacccggtttccccggtgactttcacttttttgcgggcaggcgggcggtatccgctgtcatataaggaagcagccagctgtttcgcatcgtgcagcaggtgatcctgattcatgctgatacggtctgccgcggacaaaatcttcatatcacgggcttcgtgtgccgaaccggacactttggcaagcgcgattgtttcgaaggttttaatcgctgcgtccatcagttcacttccgccgtccaaataattcatgtacagctctttgtttcctccgccgcccggaataaggccgacgccggtttcaacaagacccatatacgattcgctcgccgcctgaacgcgtgccgccgggagacagacttccgtgccgccgccgagtgtcatcccaaatggcgccgcgacaacgggtttagcgctgtatttgatgttcagcatcgtctgctgaaaacggcggatgacaaaatcgacttccatgaagttatcatcctgagcttccatcaaaatcatcgcaaggtttgcccccgcgcagaaatgtctgccttggttaccgatgacaagacctttataattccgctccgtttcctcaagcgcattgtcaatcatctgaataatgtctaagccgatcgcgttgcttttcgtatgaaattccagcagcgcgacatcatcgccgagatcaatcagactggctccgctgtttttagtgataacgccttttgtttcttttaacgtttgcaggctgatccgtttcggattttctttcacagccctgtattggccgtctgaatagtaaaatggtgttccgttttccttcatataaaatgtgtcatggccctgattaagcatttctttcacccagccggggagtgctgcgccttcttcttcgagccgctccgctgattttctgacgccgatggcatcccacatctcaaacggtccgagctcccatccgaagccccatttcatggcgtcatcaattgctttgatatcatcagcgatctcacctaaaagccgggctgagtataagagtgtttgcgatgtaatattccaaagcaggcgcccggcgcggtcatcagagtatataagcgctttcattttgcctttggcaccctttgcctgtttggcggcttctaaagcgggtgtcttcattttcgagcgctcaccgtatgtcatggtcagcggatcgagttcatatattgttttaccttcttttttgtaaaaaccttggcctgatttgctgcccagccaattgtttttcagcatgtcattcataaattcaggaagcttaaacatgtctttttcagcgccgtcggctttatcatacacattttttgccacatgggcgaaagtatcaagccccacaacgtcaagggttctgaaggtcgcgcttttcggtctgccgatcaaaggcccggtcaccgtgtccacctcgccgatgcggcagccggaagaaagcatttctcttaccgtgaccagcaggccgtacgtaccgatgcggttggcgataaagttaggcgtgtcttttgcgatgacgacccctttcccgagcgtgttttctgcaaatgaagtcataaactccagcacgtcaggatctgtttcctgaatcggaatgatttccagaagctttaagtagcgggccggattaaagaaatgggttcctaagaaatgagctttaaaatcggcagatcggccttccgccatttttgtgacggagataccggacgtattgctcgacacgatgcttcccggtttccggtattcatcaacgagtgagaaaatctgtttttttacgtcaagattttcgacgacgacttcaataatccaatcagcatccttcaattgagctgcgtcatcttccaaattccccgccgttatatagtcgagattggcagccgaagtcagcggcgccggtttttgcttcagcagcttttgcatggccgatcggctcagtctgctgcggacctccgggctttctaatgtcagcccttttttcatctcatcctttgtcagctcgtttggcacaatatcaagcagcaggacgggaattccgatgttagccaagtgcgcggcaattccggaccccatgacgcctgatccgagaacggctgctttctttataaacttgtgcatgagtcatcccccttgaactttgaatgaatagtcattcattttttcggcaaaaaaaatgaaacccttttcttcttacatcttaaaagattttcaggatgacttcaatagcaaatatggaatttttttaaatttttctgcttccgcatgttccatggcgcgggcgggaaacttaaacccggaggtgaagggaatggtgcgagggagaaaagatccgtcttctgccgcagtgagcgcggccagcatgaaaggaaatgcgggaccgaagcaaaaatacggcggcggcaaacggacgagccaaaatcagcaatataaaaaagacaacatggaataacatgctgcggctgctttttggagcagccgttattttttgaagatccctttcagcacaaatgccgcatttgccgggcgctcggcaattcttctcatcaggtacccgtaccaatcggttccgtacgggacatacaccttcatcctgtatccttcttcggcaagctccttctggcgctccgttctgatgccgtacagcatttggaattcaaactgctcccggggaatctgatgttcgctgatgagtgttttcgtaaaagaaatgatgtcatcatcatgtgtcgccaccgccgtttcatggccgctcaaaagctgcagcttaatcagctgctgaaaatgaagatcggttgcttttttatcagggaatgcaacagccgccgattctttataagcgccttttacaagcctgagccgcggcttgtatggcatcagaccgctgatatcttcagctgcgcggtacaaataagcctgaatgacggtgccgagcatcgggaaatccggcttgcaccgcttatacagctcaagcgtacggccgcatcttgaatagtcctccatatcaatcgttacaggcacgccgcgttcttttgcctccgtcaatatgtctctgacatgctgttccgcgagcttctcggaaatatccagaccgatggatgttaatttcagcgacagctcacaatccagttgattctcggcaatggccctgattgcttttttacattcttccgccgtccttttcgcatccttctctgaacccgcatattcacctagataatcaatcgaagccgacagccctttttggttcagccgctttaccgttttcacagcttccgtgagtgtttcccccgcaacgaaccttcccgcgccgaagcggattccgtaagcctgggcgaattttgtaagcattttatttttcgacaaaaataaacatatgctccgcagcaaggatgaactccctcctttttcttttattcgtgtatgaaatcccgatcgcagagaaagctaaaaagaacagaattgaaggaggcgtttatatgaacaaccaagagcagcacggaaacttgccgcctgccgtcatctcaacgaaagaccatttgtatcttgaggacatgctgaactggaatctgcttgccatgaaaaaagcgcattttatggcggatcactgccagaatcagacgttaaaacaagagcttgatcaaatcggccggatgcatcagaagcattatcagcacatattgggccgcttgaaccccgatcaaggcggacagacaacaacaggctatatgcaataggaggacaatacatggaacagcaaaaccaaaaaatcacgaatccgcaaacgcccgtgcccaatacggcgcaaatgaatgacagagacttggtgaatgagctgctgacgacggaaaaatacatcacggcttcatattgcacagccctgcacgagttcagccacgagtctctttatcaagatattcaggcgattttcgatgagtcacaaaaagcgcaaagaagattatacgatgtgatgtttcaaaatggctggtattccattgaagcagccgatacccaaaagcttcagcaatcgtatcagaagttccggcagaccattcagcagcagtctccctaccagcagtaaaacgaagaaggatttgatgttttcgacaagcatcaatcctttttttatttttgcacaaaaagattgacttgtcattaatccttatttatatttaactaatgttaattattttctcaaggaacaagatgaggaggagttatgaaaaacgcggatcaatatgtgtctgacatccagaaatctcttcagacgctgctgcaaaacatacagcctgaaatggtggaaagcatggcaaaacacgaggtgacgcctgcccaattatttgttttagccagcctgaaaaaacacgggagctgcaaagtttccgaaattgcagaacgcatggaggtaaagccgagtgcagtgacgctgatggccgaccgcctcgaacaaaaaggacttatcgtccgcaaacataaccagcaggacagacgcgtcatcgacatcagcctcaccaaaaaaggcgaaacaaaattcgaagatgttgtggaaggacggaaagcgatactggcgcgaaacctatccgttctgactgaagatgaactgattcagtccgtgaacatcatccgcaaagtagcggaagccgccgagaaatacgcggctgagcaaaaagaaaacgaatagaaaagaggagctgccgaaacatgagcattgaaaagaaagatccaaaacgcacattattaataaccggcttaatcatcgccatgtttttctcagcccttgacggcaccatcgtaggaacggcgattcctaaaatcgtgggtgacctcgggggattaagcatgatgacgtggctgaccacggcatatcttttaacttcgacgacgatcgttccgattgcggggaaacttgcagatttattggggcgccgcgtcgtctatgtatcaggtttattgatttttatgggagcttccgcactgtgcggaatggccagcaacatgacggaactgattattttccgcggacttcagggaatcggcggcggtgtcatgatgccgatggctatgatcgtcatcggggatttgttcacagggaaacagcgtgccaagttccaagggcttttcggggcgatttacgggcttgcttccgtgatcggcccgcaaatcgggggctggattgttgactcattaaattggaaatgggttttctatatcaacctgcctgtcggaattttagccgtgatctttatcgcaagaggacttcaaggcagaaaacagaccgggccgattaactttgacatcgccggcattttcacaatgatcgtcggaatcgtcagcctcctcctcgcgctcagcttcggaggaaaggattacgcatggggctcttggcagattctcggtctctttgcgcttgcacttgccgggattgtcggattcattttcgctgaaatcaaagcaaaagagccgattctgccgatgtacctgtttaaaaacagaacgtttaccgtactgaatctgatcggctttttcatgagtatcggcatgttcggcgccgttacgttcgttcctttctttatgcagggaattatcggagtcagcgccaccgcttccggcacgattatgacgccgatgatggtatctatgattatcacaagtattatcggaggccagctggtttataagatcggtattaaaccgcaaatcatgatcggcatgctgatcatggccgtcggcttcttcttattaacgactttgcagctggatacaagcaagctcgcggctacatgctatatggccgtgatcggtctgggaatggggctcgtcatgccgcttctcacactcgctctgcaagaaacgttttcaaaagaagagctgggtgttgtgacctcttcaagccaatttttccggatgatcgggggaacgttcggcattacggtgctcggcgctgtcatgaatgccagatcaggaagccttttaaccgacagactggtgccttacttagactcactcccgaaacaggcaagtgcctttgccgcccagtttaaaggtatgattgacaagaatcctgaagggctgcttcaatccttgttcagccaggaatcgattaagcagattccggccgcattttcttcccatatcgtgccggttttgaaaacgtcactgatggattcgcttcacagcgtgtttttcacaggcctggcctttatcgctgccggattaatcctcacgctgtttgttaaatcaattaaactgacaaacaaaaagacaggcaaacaagaagaaaaggcgaaagccgtttaacaaagaaaaatcccgcggatgccgcgggatttttttatatcatctgggcctctccgtttccgaatgaccagtcttccgccgcattgcctgagaggacgataaacacatcttcttttctgacgcccagcttttcgtgcagccggtcagccaaatgctgatagaatgcttgtttctgatgagttgttctggagtttttcaaagtaaagcggataaacatcagttcatcgctccgctcaacttgaagatatgacggatcatagaaaaactcccctttttcgtgctggtgcaccacttgaaaatagtcaccatgcggaacatcaatcatctccgtcatcgcggtatgaataacggcgctcatttttttaagccaaaatccgcttttccctttctgtaaatgaatctgtacaaacggcatcatttctctctcctttcgtcacatcgtctggccgcaatcggctgttatgatttgtcccgtcagtgattcctgctccagcacagagcaaatcagttcaccgatatcctccggagcagcgatccgttccagcggaaggcttccggcaagccggtacatcgtctcttcccgacccgtccaccatcttgttgcaacggctccgggcgcgacacagcatacacggatgtccggcgccagcgcatgggccaatgattttgtcaggccatgcaccgccgctttggaaacggcatacggaagggaagaacccgctcccgtcaggccggcgatgctcccgacattcacaatagcgcctgacttttgctttttcatatgagacgctgccgctcttgcgcaatgaaacatcccgtttacattgacagcaaataattcatcccatacttctttcgttgcagattccaaatcatgaagcggaatatgtctggtgatgctcgcattatttacgagtaaatcaaggcttccgaatcggctggctgcttcgttcaccatgtctctcgcctgtttgtctatagaaacgtccgcttgaatggtcatcgcgtgtccgcctgcttttattatgaattctgccgtttgttccgcttccgattttgaatgtgaatagttaatgacaacagccgctccccgttttgctaaggcaaggcacgccgctcttccgattcctgtaccgccgcctgtgaccagtgccgttttatgttgtaaattcatggcttcttctcctcttacgttcgatgttcatcagctgatatgtttattgtaatggagatgtgcattttcgtataatgattgttaaagatgtttcatatcacaaaaaatgatagcaaagagggagagatgacaatggaaagcggagatttgcgaatttttcagatggtggcccgtgaaggttccattacaaaggcggctgcgcgtctcggctatgtgcagtcaaacgtgacggccagaatccgccagctggaagaagatttgaaaaccgagctgtttttccgccataaccgcgggatgacgctgtcttcaagcggcacggtgctcctccattatgcggatcaggtcgtcggtctgatagaagaagccaaaatggcgctcgcttcaacagacaagccaagcggaccgcttatgatcggctccacccagacaacagccgccgtcaggctgccgaaacttttagcctcttactatgagcggtatcctgatgtggagctgtcccttacgacaggacatacacaatatgtaaccgataaagttcttcgctatgaattggacggcgcatttatcggctgtcactttcatcatccggatttgcactccatcccggcctttgaagaagaagccgttgtcgtgactcccgctgccgtcaccgctatagaagaagcggtaaaaaagccgcttcttgtgtacagcacgggctgcacgtatcgtgacacattagagcggtggcttcattccattggaacggcgcatccggccattatggaattcggcacccttgaagcgattatcgggggagtgacagcggggctcggcattacgctgctcccgcgaagcgtaattactcagcacgccgcactaggcgcggttcggatatggaccattcccgaatctttcagcatgatgaaaacggaattcgtcacgcggaaggattcatatatgagctgtgcattacgggcctttattgattccttttcagcaaaaaaagcttccggcacctctctttgatgccgaaagctttttattgttttttatgtgctcttcattgagctgtttaatgtgctgtgccgcggctttgatgccctcttggcgtccgggcaggattcgttccaatgttttacgttcagcaaatatctaattatgatcgaaaagaacaattgaaaaaatccacgagatccgtatagcaaaacggctctaatagcaggcttttaaaaccaactaaaaacattaaattttaacagcgtgtcaaaggaagccggcattgcaaaagcaacgttgtataacaacaaggggttccgttcgaaaattttaaaattaagaaaccaacaatcgcaagtacccaccccgcaacaagtgaaacggggaatgagtgtaagtaacaaggaccccctcattacatccctaaaaagaaaacatcaaaagccggagaaggggtgtcctttttcttatgccgctaacggtgcagttgagtaaggggtaaaaattcaaaaaaatagtgatggaattctttaataaaccttaaacatttcatagttatctttatagtacgacataataaagtcacgaaaatttcttaccgaagaagataacagcttatgtctcatccaagataagccgactggatatgaagcagagtgatcagtcacttttataaaattcagccccaatgttctgcaaactgaaataggaagcaacgccacaccttgatccagctttataatctcgaccagtaaatgagaatctgcctcaaatgcaatatttgggatgaaaccagctttctcacaaagcgaggctgtaaaaccgctatactcttcgttattagcaagggtaataaatggttcatcggcgacaagacgtaaagaaatttctgttttacccgtaaatcggtggtttgagggcaaagccagaacaatatcttcatttaccagcacccaactctctatctcttcatcttgaatcggatgacctgttattcctaaatcaatgtcccctttttttaaacttgttatgatctcgcttttaactccgattgcttggagaatttttgattgaggagagcggttgatatattcactcatcagtcctgcaaggaatcttggattggaaatagatattctgatggtgtcagaaattcgatgttcctccaattgaatttccgtttgtgcattttcaatctcagtaaaaatcctgtttacacgttttaaaagaattttccctgctgaactcagcttaatatttctgccttttctctcaaacaaggttgttcccagttcattctcaagtctttttatagtgagacttaaagaaggctgggcaatctttaattgttctgctgctttagagatatgttcagtataggcaactgtctgaaagtattttagctgcagcaattccatctgtctgcacccctctcatttatttcaataaatatatatataccttattatgtattggattaaatgtaaatgcgaatgtaagataatagcatagttaaagaaaaggaaagggagtcattcaatgaaaattgatgtgaaagatatagcaaaaaatttaaatacgccactaacagcccctgcttatcctatcccaaattataaatttgttaaccgtgaatatttaaatattatttaccgaacggatgaaaaagctttacgtgcagcagtgccggaacctcttgaaattactgaacctttagtgaaattcgaagtgatgtggatgcccgatgtttccggacttggtgcctatacagaggcaggacaagtcatccctgtcagctttaatggtgaagaaggagattatgtacattctatgtatgttgacaatttcccggctattgcaagcggacgggaacttactgcatatccaaagaaattgggtgcccctaagctgtatatagactctgatactcttgttggcacattggattatggcagtcttcgtgtggcaactgccactatgggatataaacatttcgaaatggacaaggaaaaagcgaaaagggaaatttgccgacctaattttatggttaagattgctactgattacaatggtgatttaagggtttgtgatttggtgcggacgcaaataacgaatatagaagttaaaggtgcctggactggaccggcgcggcttcaattatttgaacatgctctggcacctcttgcagatttgcctgtattagaagttgtttcagcatctcatatccttacagatttaaccttaaatgcagcacagccggtttataactacttagaggaaaaataaggagacgtttacaatgagaattgcagttttaggagcaggttctttaggaaccattgttggagcatatctgtctgctggcggaatggatgtcgaattgattgattcgtacaaagaacatgtagatactctaaatcaaattggtgctaaagtagttggtacaacggaatttcaagcaaaggtgaaagccattacccctgaaaacaaatcaggcaagtatgatttaatattactcctgacgaaacaattatataatgattccatccttaaagagttactgccttttttaaaggatgacagtgtagtatgttccttgcaaaacggtatacctgaacagaaagttgcttcgatcgttggtgatgaacgtgttattgcaggttctgttgaatttggtgccacgtttattgaaccaggcgtatccagacttacaactgagtatactcaatttaaagagtacgcttttcaaattggagaattacatggtgaaacaacagaaagaatccagcgtattaaatcggttttagaccttatcggcggaacacatatttccgataatttagttggaacgaagtggtcaaaattacttatcaataatgcattcagtggtttatcggctgcattaaacggagaatacggagacattcttgaccatgaaatcggcattgttagtgcagtccatatcgcagatgagacgattaaggttggacacgccaatggtgtcaaatttgcgaaaatgggcggccttgatttagaatctttggaattaagaagtgaaaatgatattcctgaacgtatccaaacatttaggtcagccatggaaccatctaggctgctaagagcaagtatgctccaggatcttgagaaaaaacgcaaaactgaaattgattatattaatggagttattcccaaaatggcagaaggtactggcatttcaacaccttttcatgatttggttgtagcacaagtcaaatgtgccgaggaatctcaaacagtgcccaattttgatacaaatataaaagcatttgaagagttattacgtatccgaaaggaaatgtgatatataggaaagagagaaagggattgctgcggcggtccttttttcttggttcagcgagcggaagaaatatacgtaaacaaacgggtgcattagttacattaatgttcttcgctatgaattgaacggcgcctttattgattccttttcagcaaaaaaagctttcggcacctctctttgatgccgaaagcttttttattgtttttttctgtgtgcttcattgagctgtttaatatgctgtatcgcagctttgatgccctctttggcgtccgggtaggattgattccaatgtttgacgagcggaggcatgctttttgcgatatgtgtatacaaaatccactgcctgacttcttcctttacatccgggtttgtttcgccaagcaatagttccgtgtatttttcaagcaggccgtccagctgctgctgcagtttctcttccataccgttcccttcccttttccatgattatgacaatcgggcggtgagggccgcttcctgcacgatacatctgccgcgtccgtgcggaatgcaaagcggcgtgccgaacagcggatcttgcgttacctggcagttcatcgcaaagacctgctgtacaagctcgcaagtgatgacttcttcgggacggccctctgcgtaaatctgtttatccttaatggcgaccagataatgggcataacggcatgccagattgaggtcgtgcagcaccatgacgattgtgcgtttttctttttcatttaattcaaacagcaaatcaagaatttcaatttgatgcgtcatgtcgagataggttgtcggctcgtcaagcagaatgatatccgtatcctgagcgagtgtcatcgcaatccatgcgcgctggcgctgtccgcctgacaaggaatccaccggacggtcggccatttcctcaagcttcgtcgctttaagcgcttttgccactgcgtcttcgtcctctttggaccattgcttcagccagctttgataagggtatcttccctgcttcacaagctgatgcaccgtcaggccttcgggagctgacggactctgcggcaaaatagcgagctctcttgccacttccttcgtcggaagcttagcgatggcttttccttctaaaagcacagaaccgcccctcggtttcatcagccgggccaatgaacgtaaaagcgtcgattttccgcagccgttgcttccgatcaatacagtgatttcgccttttggaatcgcgacatccaattcgtcaatgataacagtttctccgtaccctaagctcagcgtctctgtagaaattgcactcataccgctaaccgctccttttttgagtttcccaacactatgtatataaacaaattgcctaaacattcaacgtgagatcatgattatattgtaacagaaattaatgactctgaatatcattatcaattagttttgggcaaaaaagcagcgggcggcggttatttttttatttccgtcatttctccatcattctttttcagtttcagataaaaatggtcatagcggctgtccaaattaaaagccgagagcacctgccggacgacctcgctttcctgcatccggctgtttacggcaagttctccgaggatcatcttcatttcatcaagcgcttcctcgccctctctgtgaacccctgagagcttgtcccggatgtcagccttttcatgaccgtcttttctttcatacaaaccttcatagcggttatgctctccggctccgtagctgacgcgaagggaaaagctgctgtaaggaaccggcttcgcggatgatacgggtgtgctgtcttgttccgcttcccgtttttcttcattcaatcggcagccggcaatcagcatcagcgtaagacataaaacgcccgccgttctgatccatttcatgcggttcactcccattccattccgatcgtttttaggtatttccaagggaggcggctgtcattcattaaacaaaaaagaaccggagcgataacactccggccggttcatctcaagattatcattcagtcagctctaaaaattcctgcacatcctgtacggcaaggcggaccgcgtcttcccaaaacgaccgttccgtcagatccgctccaaggtgcttcatcgccaaatcctcaacagtcatcgaagccgtgtcacacaaaagcgcgatatatttttcttcaaaatccgcgttttcccgaagagctcttgcatatattccaagcgaaaataagtaaccgaacgtatacggaaagttgtaaaacggcactcccgtaatatgaaaatgcagtttcgacgcccagaaatgagggtggtactcccctaatgaatcgcaaaacgcttctttctgcgccgcttccatcagttcattcagtttctcagccggaacgacgccctgcttgcgctcttcataaaaacgcgtttcaaataaaaatctcgcatgaatattcataaacatggctacgcttttttgaattttatcttcaagcaagaacagcttttcatcctttgtctccgcttgtttcaaagcggcgtcggcgacgatcatttccgcaaaggtcgaggctgtttcagccacattcatagcgtaggctctgttcagctgccgcacttgaagcatggcctcctgatggaacgcgtgaccgagctcatgcgccagcgtcgatacattcgaagcgcttccggaaaacgtcataaaaatccgggattctccgctgtcgggaaagctggtgcagaaaccgccgacccgtttgccgctgcggtcttccgcttctatccaccgatcacggaacgctttttccgtaaatgcggacagctttttgccaaacgtcgaaaattggctgacgatcagattggccgcttcatcatatgtgtattctttcggagcctcgccgatcggcgcgtccacatcataccagttcagccgctcaagccctaaaagagacgcctttcgattcaggtattcggcaaaaggctttttatgatcggtaatgacctgccacatgacatccagcgtttcttttttcatccggttgatcgcaagcggctcttccaaagcgcttttccagccccgcgctttatagatttccgtgcggaagccggccagatggttcagcgtgctgccgaaaagctcctcttctcctttccacgcttcattaagctctttgaacacttgacgtctgatccgccggtccgggtgcgccatcatattttccgcttggccgaccgacagctctttatcctcaaacggaatcttcattctgccgacagccgcattatacaggtcgccccatgcgtgatagccgtcaacggccaggccttcaatcagcctttcttctgaagcgctgagcttctctttgacacggtctcttctctcatttaaaacatatgtgagatcctgaagttccggtttttgcagcagctcctcccagacccgctcgtcaatccgggcaagtgtatcgtcaagggtgaccagagcggatttaaaatcactgctcagctgattgatccgcgccctccattcattcgctttctgatcatgagtgttctgagcctgaagacagccgacgaacgctcccgcctgcctgatcatgatcgctgaccgttcaaacctatcaatcagattgatcagctcccggctttcatccgcatgcgtcggaactgtaaatgcttcaaccgcatgttgaaaagcgcttagatgctttttgagctcttgtatgtattgctgaaactcttccgaccggctcccgccctcaaaaatggagtttaaatcccatgtttccttcaatccctctaatgccatcttttctttacccctttctatccgaagctgactccattataaaacaattctgacatatttccgaacgatttctccttctttctgcgagatgttatacactatgagataagaacaaacggggaggattattatgaacagaaaaattgccattgtaaccggcgcgacgagcggattcgggctgctgacagcgctgaagctcgcccggtcttatcacgtcatcgcaacagccagacagccggagaaagctgaaatactgaaagaggccgccgctcaagcgggtgcatccgaacatgttacggtcgtttctttagatgtgacaaatgagcagtcggtgtctgacttcgggaacaccatcagcggtttcggaccgattgacctgctcgtcaataacgccggcactgcgtacggggggtttattgacgatgtactgatggaacattacagacagcagtatgaatcaaatgtattcggtctgattcacgtcacaaaaaccgtgctgccttatatgcgaaaacatagcggggcgaaaatcttcaatatcagcagtatcagcggactgaccggtttcccggctctatctccgtatgtctcttccaaattcgcggttgaagggtttacagagagcctgcgcctcgaactgctgcctttaggaattgatgccgctttaatagaaccgggctcctataaaacgtctatatgggagacgtctctgtccaatcatcttacggcacccggcaaagattcgccctattaccgctattatcagcaaatcgaagcttacttcaaagccaacgcatccaaaagcggggatcctgatgacgtagcggagctgatttatcaattggcacaaaggaaacggctgaagaaactgcggtatccgatcggcaggggcgttaagctgacattggctttccgctcactctttccgtggtctgcctgggaatcgattataaagaaaaagctgttcacttaaacctaaattataattattataatttagtattgatttttatttaatacgtgatataattaaattatcagatcacagggaggacgatgaatatgaatacacaaaacgcgaaaaaaactgaaactcttgttgagaaatcaatgaacacacaattatcaaactggtttatcctttactctaaactgcaccgcttccattggtatgtaaaaggccctcatttctttacgcttcatgaaaaatttgaagagctgtataacgaagcggcggaaacggcggatgccatcgcagagcgacttctggccatcggcggacagcctgcggcgactttacacacttaccttgaacaagcttccattacggatgaaggccaagaaaaaacggcttctgaaatggtggaatcactggttcaagactataaacaaatcagccgcgaatcaaaatttgttatcggcatcgccgaggaacaaaatgacccgtcaactgccgacctgtttgtcggattagttgaacaagcggacaagcatgtgtggatgctgtcagcctacttgggagaatgacgaaaaaagctgaacctcagttgcaggttcagctttttttatgtgttcagcttgcgctttcggtttgtttcgttaatgtgacgttcagcgtctttttgcttccgcttctgagaacttgaacagtcgttttatcgccgattttcagctggttatataagatttgtctgatatctgcgctgctgccgacatctttgccgttcaattgtacaatgacgtcatttgatttgatgcccgctttcgcagccggtgagccggactgcacttcttttacgtaaacacccttagacagctggtcgccgaacagtccgagcgtgttttcctgataggtttccggcacttgcgccatgtcaatcatctgcacacctaaaaatgggcgctcgacttttccttttgcaagcagctggtcgactatcggttctacatcattgctcggaatggcaaagccgagtgactccacgccgttttcactgactttcatgctgttgatcccgataacttggccgcttgagttgattaacgggccgccgctgtttccggggttaatcgccgcatccgtctgaatcacgttcatttccactgtgccttgggatgtatcggcgtctaccgttctgttcagcccgctgatgacaccttgtgtgacggtgccggaaaactgctggccgagcgggttgccgatggcaatcactttatcggcaatgcggagcttggaggaatccccgaagctggccgcttttttgacattggacgagctgatttccaatacagccaagtcactgatggcatcctttccgacaagctttgccgtttcggttttcccattgtaaagagtgaccgacagtttgttcgccccttctacgacatgattgtttgtaatgatgtacgctttttcgccgtcttttttgaagatgacgcctgaccccgtgccgctttccgtttcagagcttgaaccgccgtcaagtccgaactggctgctttgcgaagcttggtagttggacactccgacaatcgcaggctccaaatcttctaccatatccgctacacttgaggtatttttcaaaggcgttgacgtaaaattcgaagactgaacttgtttcgtatcagaaacggcttctgtcttatgctgctcacccggcaggtttggcacaatgccaagcacgaggccgccgccgataatgccgcctaaaatcgggctcagccaagcggctctccgttttttttcttttttcacggcagccgttttttcaaattccgtaccggccgccgtctcgttttccgcttctttcgagacgggcccttcgagcagctcgggctcctgatggctgatctgctgctgttcatttctgttttgttccgtatgtgaaagatctgactgatcgcggcttctgccgtcatctcgatgatcattcatattcacgcacactccttcagcatgttttcattctatcgattacatattcatcgcatgtacaagttctattgtcccaataataaggagaaaagcaaagctccaaaacaaaatgtgtttgaacatgttatcttccccgctttttttcttcctttcttcccttatacacatcataaacaaacattgtgggataaaaatgaaaagaatatgtgaaattatgaaaatgcggcttgagtgtgttaaaactagtataatgacgttgaaaggatgtgaaatgccttgtcatacaccatttatctagttgaagatgaggataacctgaatgaactgctcacaaaatatttagagaatgaaggctggaacattacatctttcacaaaaggcgaagatgccagaaagcagatgcagccgtctccccacttgtggattcttgacatcatgcttccggatacggacggctatacattgataaaagaaataaaagaaaaagatcccgatgtgccggtcatttttatttccgcgcgggatgccgatattgacagagtcctcgggttggagcttggaagcaatgattatatcgccaagccttttttgccgagagaacttattatacgggtccagaagctgctcgagctcgtgtataaagaacagcccgccgcaaagaaaaccggcatcaccgtttcttcctacaatgtgatcgaagatgcccgagaggtttatgatgaaaccggctgcctggtcaatttgacgtctaaggaatttgatctgctgcttttatttcttcaccataaaggacaccccttttccagagaagatatcctgctgaaaatatggggccatgattatttcggcactgaccgggtggtcgatgatcttgtgcggaggctgagaaaaaaaatgcccgggttaaaggttgaaaccatttacggattcggctacaggatgatgacgtcatgaaaaataagccgcttgcttttcaaatatgggtggtcatttcaggcatcctcttagccatttcgattctgcttctcgtgctgttctcaaatacgctgcgtaattttttcacggatgaaacgtatacgaccattgaaaatgaacagcatgtactgacggagtaccggctgcccggatcgatcgagcggggatattacagcgaggatgcgaccgcgccgacgactttccgatccgttcagcacgttcttctgccggaacgggaggaatcggccagtgacaaagacttgaactacttttcttcttcctttatccataaggtgtacaagctcgcgggccgccagcacagcgtcacgaaacgatacagcgcggacatcagcggtgaaaaagtatttttcgtcattaaaaaaggcctcaccattaacggccaggatgcgatgatgctgtcttacgcccttgattcttatcgtgatgatctggcattcaccctgttcaagcagctgctctttatcattgccggcgtgattttgttaagctggattccggcgatttggcttgccaaatatctctcgcgcccgctcgtttccttagaaaagcatgtcaaacggatttcaaaacaggattgggatgatccggtcatcgtcgacagaaaagacgaaatcggaaaattaggccacaccattgaagacatgcggagcaagctggtgcaaaaggatgaaacggaaagaacgctcctgcaaaatatctctcatgatttaaaaacgcctgtcatggtgataaggggctatactcaatcaataaaggacgggatttttcctaagggggatctggaaaccacaattgatgtcattgaaggcgaagcagaaaaacttgagaagaaaattaaggatttattatatttaacgaagcttgattatttaatgaagcagcgggtgcaccatgagacatttgacattgtgaaggtcacggaagaagtcattgaacggctcaaatgggcccggaaggaattatcgtggaccgttgaaacagaagatgcattaatgatgcccggtgatccggaacaatggagcaaacttcttgaaaacattctcgaaaatcaaatccgctatgcagaaacggcgattcacattcggatcagccaaaatcagcagcagattgtcatgacggttgaaaatgacgggcctccgattgaggatgagatgctatccagcttgtacgagccttttaataaagggaagaaaggcgagttcggcataggactcagcatcgtaaaacggattttaaccctgcataaagcatcaatttcaattgaaaatgaccaatcgggtgtaatctaccgaattatcataccaaagtagactgtagtgtttcattgcagtcttttttatgtgaaggaatagccgttaaaatctctgtagtttgctttcagcggtttttggcattgatgaacccatttcttttcacaaattgtctttttcggatatttcaccttttcgactttaattcctctgtttcgcaagcggctgatcatttcatctaattctttcattttcagattcaccctttcgccagaactttgaccattcggtcagctcactttataatataaataaaacaaaacaaaaaaacaagttacaatcaggttaaatttacggaatatcaatatgaccatatagtcatacatgagaagcacaagccagcctcctggctccgaaagggtggaaccattgaaggaaaaagaaaagctgatcattgaagcagcaattaaactgtttgcccgaaaagggtacaaatctacatcggttcaggaaatcgccgatgaatgcaaaatctcaaaaggcgctttttatctaaactttccttccaaagaagcactgcttctatccatgctgaattactactatgataaaacgtttacccgaatcacgacgatccaaacggagggtgacagtccgagagccgcttaccaaaaacagcttgcggtgttttacgaatcgattctcgcccatcaggattttataaccgtgcagatgaaagacggttcacttccttataccgaagaagcggcgcagtgcggaaagagaatccgccggtcgatcctgcagtttcatatcgacagtcttcttgcgatttacggagaaaaagttgaaccatacacagccgagctttgttttttaatagaaggaatcagtcagatgtatcttgaatatctcattctgaccggccggtccgtacagccttcgcttttggcaaataccgtgattcacagaattgatgacatcgtaaacggaatggcggacagacatgatgaagcgtttatttctcttgatgaggcaagctcactgtttggcccccttcataacgggcagcccgatcctttaagccaatcgatcttgcagaccctccgcacgcgcatcggcacgatggacaagacgcaagcatctgaattcaccgagagcttggatattctggaagcggaaatgaagaaaaagtcgccgaaaccggcaatcatcaaaggaatgattttgaatttgaaggaatccgacctgctggctgaagatgcagaacagctcagatttttactgaaacagcagtttatttagaagaacggccgcaatgactgcagccgttctttctttttatgctttcgggtgcaccatatcttccggacgcaccatttcattaaattgttcttctgtcagaaggttcagctgtaatgccgcttctttcagcgtcaagccttctttgtgggcaagcttggcgattttcgcggcgttttcataaccgatgtgcgggttaagcgccgtaacaagcattaatgagttagagagattttcctgaatcgtctcttggttcggctcaataccgacagcgcatttgtcatggaaggaattcattccgtcactgagcagctgcacggtctgcaggaagttatagataataaccggtttgaagacattcagctcaaagtttccttggctggccgcaaatccgattgtcgcgtcatttcccatcacttgcgcggcgatcattgtcagcgcctcactttgcgtcgggttgactttgcccggcatgatagaacttcccggctcattttcaggaatgacgatttcgccgattccgcagcgcgggccgcttgccagccatctgacatcgttggcaatcttcatcaggtcggcagccaatgcttttaacgcgccgtgaacgtgagtgatttcatcatggcttgtgagcgcatggaatttgttaggagaactcttgaatgtctgccccgttacttttgtgatttcttccgcgacgaattcaccgaactgcggatgggcgttgattcccgtgccgactgccgtgcctccgatggcaagcgcgcggattttttccgttgactcaagaatcatttctttagaacggtcaagcatgtatacccagccgctgatttcctgtccgagcgtcagcggagtggcgtcctgcaaatgcgtgcgtccgattttcacaatatcctgataagctttcgctttttcatcaagcgtcgcgcgcagctgatcaagcgccggaacgagctgctcatatacggcaagaaccgccgcaacgtgcatcgccgtcgggaatgtatcgtttgagctttggctgcggttgacgtcatcattcggatgaatcttcagctcggaatttttttctttcaataaagcagtcgcgcggttggccaccacttcattcatgttcatgttgctttgcgtgccgcttcccgtctgccagacaacgagcggaaagttatcgtcgtatttgccgtttaaaacatcgtcacatacagcggcaatcgcctgtgctttttcagactctaagttgccgaggcgttcgttggcgatcgctgtgcttcttttcaatattgcaaacgccttcacaacacgctgaggcattttttctgaaccgattttgaagttctctttgctgcgctgtgtctgagcgccccaaaatttatctgccggaactttaacttctcccatggtgtctttttcaattctgtagtccatttatgtatccctccataacagttgcttcaccctgagtattattcgccagtaacagatgaaaccctttttatttttcggccttggccgtttttaatttcagctcaagatagacgcgcgaatccttagagtatttatacttcggatttgttttacggtattctttcgacgtgtaagccacttcgtaatgcgcttcaaatgatttgatgagctgttcaatttcttcggcatttcctgccagtctgacttgtgccacatctctcctccgctttcataaaaaaacttgtaccattaaatactttatcatagtatatcatttttttaacaggaaaagataacctcaattaaggattggaaggcgggtgactgtcgatggcgcaatcggaattcaaggaatacatacacgttaatctggcactggtgcttccccacgtagagcagaatgatgacctggttcaaaataaaaagatgcttccgaacgggcttgttttttattatatgtatctgagtgaaatgaacgacgaagacaaaataaaagaggcgattgaaacgcttcttcaggaggaagacactctgacgctggatacggtgacgaaacgtcttgataagatcgacgcccgtcccgtctttacgtcgaaggaagccgtcatctccattctgcggggaaaatgcgccgtgtttattaacggacttgacagcgtatacattttgtccacgggaaaaagagaaaaaagaagcgtgaatgaacccacatccgaaaaggtcgtaagaggtccgaaaatcgccttcatagaagattctgatacaaacgtcgccatgatcaggcagcgcacgaaccatccgaagctgaaaacgaaaaaggttccgatcggagaaaataagttaaaatacgccacggtcatgtacatagatgataaggcggacccgtctgtcgtcagcgatgttgtaaagcgcctcagcgaagtgaagatggacgacatccaggattccggaacgcttgaggagcttattgaggataataagtattcgccctttccgcaaatacaaaatacggaacggcctgataaagtctcttccgccttgttcaacggccgcgtcgccatccttgtcgacaactcgccgtttgcgctggtggttccggcttctttaggaattttaatgcagtctcccgatgattattatgaacggtggatttccgcctcgctcatccgggtgctgcggtttacgtctatttttattacgctgtttttttcgtccatttatatcgccctcgtttcgtttcaccaagggctgctgccgacatcgcttgcagtcaccatcgcggcgaacagagaaaacgttcccttcccgcctatcattgaagcgatggtaatggaaattacgatagagctgctgagagaagcgggcttgaggcttcccagcccgctcggccagacgatcggattggtgggcggggtcgtcatcggccaggcggccgttgaagcgaatattgtcagctccatcatggtcatcgtggtcagcattgtcgcgctcgcttcatttacggtgccgcagtacgggatgggtctgtcgttccgtgtgctccgtttcatttcgatgtttaccgcggcagctttcgggctgtacggcatgattttatttatgctggcgatctacactcatttatcgagacagcgaagcttcggttctccgtatttctcgccgaatggatttttcagcttaaaaaacgcaaacgactctattctccgtctccctattaaaaatcaaccaaaagaggcgaaaaacgtaaatgagccagaaaacaactcacaataagcttacaagctatcaagggacagcattgatttcaaacacgatgctcggcgcgggactcctcaccatgccgcgggcgctgtcatcaagggcaaattcgccggacggctggatcgcgttatgtctggaaggcgtcatctttatctttttgatttatctcaatacgctcattatgaaaaagcatcagtacggatcattatttgattatatgaatgaaggactcggcaaatgggcgggaaatatcgtcaatcttatgatctgtctctattttataggagtcgccagcttcgaagcccgggcgatggcggaaatggtcaagttctttttattggaaagaacgcccgtgccggtcacgctgtttatctttatcgcctgttccgtttatttaattatcggcggcatgagcgatatcggcaggctctttcctttctatttaacgattacgatcattattttgctggtggtgttttctttcagctttaaaatatttgatctcgataacctgcggccggtgctcgggcaggggttttctcccgttatggcttccttgaccgtcgtttctgtttccttcttgggaattgagattatgctgtttctccccgagtacctcaaaaataaaaagcacacattccgcgtgtcggccatgggctttggcatcccgattattttatacatcattacctacgttctcgtcgtcggcgccttaaccacccaagatgtcaaaacaatgatctggcctacgatcgcgctctttcaatcatttgaaatcaaagggctttttatcgaaaggttcgagtcctttttgcttgttgtctggatcatccagtttttcgccacctatgtatcatacggatatttcgcgacttcagctcttaataaaattttcgggctgaagcagaaaaagggcgtcatcttcgtaggcatcgcgacattcctcggatcattgatgccaaaagacgctaacaagctgatgctgttcagtgatattctcggctatatcttcttggttttctttttgctgcctttactgatgtttggagtcgtcgctgtgaaaaggaaggtgaaaaaagcgcaatgaagacatacatcgtaatcatcctttgcacattgcttttggccggctgctgggacagccgcaatttagaagacttgagcctcgttatcggagtcgggctcgataaacccgaggaagaaaatgtggaagtgacacagcagattctggttccgcaaaaagcaagttcccagcagtcgtcgtcaggcaatacgacaaaggtgacttccactcccggggaaaccgtccatcaagctttaaggacggcatcgttaaaaaatcaccccgcattctcccagcacttgcgcatcatgctgttttccgaagcgctgttaaaggatcacatcccgcttgacgcattgatgaaccaatttatcagggacaacggtacgagaagaagctgcaatgtgatgacggtgccggataaaacgaaagatattttcaaaatcagtgaccagggagaacctgcgtcaaatacgatctatgacttaacggagaataattcggtcaccatccggatgatggcgcccgtgacattgggggaaatatcagagaaaatcgccaaaggcgagacctttgcccttcctcaagtgcgccaagtgggcagcagactggaaatctggggcgctaccattattaaaaataaattctggtatgcgaatttaacgcctttacaagtccagaatatgaacctgttcacaggcacggtaaagggaggcgtcacgtttgcaaagcatgacaatcattatttatccttcgaagtattttccagcaaatataatgtaaaaacaaaatataaaaatggaaaattcaagtttatcgtaacccggtttgttgaaggccgtctgtctgaggattggaacccgaaagaagattctttcaaggagtcctatataaatgaaatcaaaaacgcggtaaaacgcagcattcattcagatgtcatggcattcattgattacatgcagcatgagttgaaagtggatattaccgggttaggcgatcaagtccggattcattatcccgataaatggaaaaagatatcctctgactgggatcatcacttcagtgaatcggatattgaatacaaagtcaaagtcgccatcagggatttcggaacaaagggaatgtcccaatgaccccgtccctcgggagagtgtgctggcgccgctctccttttcttatgtcacgagatgattgcggtgggcatatacggctgcctgcgtgcggtcactgacatcaagctttgacaatatattcgtaatgtgggttttcaccgttttaatcgtaatgaacagctcttcaccaatctctttattcgtcttgccttccgcgacgagacagaggatttccagttctctttttgtcagcgtttcatgcggaagctgattctctgaatggcgcagccttgacagcacttttcccgccaccttcgattcaagcttcggttcgcccttggcagccgctctgatggcttcggctatttctgccgccttggacgttttcagcaaatagctgagcgctcccgcttcgatcaccggatacactttgtcgtcatcaatgaagctcgtcagcacgatgattttcggatcattgagtgtcgcgcagatctgttttgtcgcttcgatgccgtccatgccgtccatgacaaggtccattaaaatcacatccggcaaaagcgctgcggccagatcgacgccctgctgcccgtctgatgcttcaccggcgacttcaatgtccggctgtgcttctaaaaatgcggccagacccatcctgaccatttcatgatcatcaatcagtaacactcgaatcactgtcgttctctccttttgttttctgataaatcgggactttcacgtcgatctgcgtgccttttccctttacggagataatttccgctatgccgccgatttcactcgctctttccttgatggaatgcaggccgtatgaggatgctttcacttgatccatcgtaaaacccgccccgttatcaatgactttaagctgaagtttttgatgtttcgcgccgagcctgacggtgaccttggtcgcctttgaatgtctgaaaacgttggaaagcgcctcctgcacgatgcggaacagatggtcttcaacgccttttgacacacccgtatcgctgatgtcccactcaatatccagcggctgcttcgctttgaactcttttaacagctcaatcagcccttcttttaagccttttccttctaaagtgacgggccgcaaatgcaatagcagcgctctcatctcgttttgcgcttcccccgccatatgttcaaccatgcgaatccgtttgacgattttgtcatccgcatctttcacctgctctaagacggcggatgtcatcatagaaatggcaaagagctgctggctgacggcatcgtgcagatcgcgcgccagccgctggcgttcttcagtgatgactgattttttcatttgatcttgccattccgcccgctcgttggagagcttttgcagcgatgtgacctggagctcgacccgcttggccatttcgttgagctggtctgccgccagaccgatttcatcatcgccgagcggcggcacccgataagcaaaattgccgttttcaaatttcaaaaccgcttcaatcagtgtatccattcttgttttcaggcggccgccatatacataaccggaaatcaaccccgccgaaagagacgccagaagcaggatgaccacaaacggaataccgaaccagccggaagaaaacagcagcatcgggtcaagcccgtaatacagcagcatcagcgtaataaacaccgcgcaaaggagcagactgagtcccgcggtcatccgcatggcgcgccactgaatattggcgagtaattttttcctcataaatacttcacatccacatcgccgatgaataacgaaattgaaattttaatccgccgcggcgagtcgccgtactcagacgatactttatacagattcgggctcatgccgcttttcttagagccgagcaggttcatatcgccgataaaagccgatgaactgacggacacttcgacatccggcgggacgtacacatcgacattgccgatgacaccgctgatggtcatcgtgctttctccttcgggaatcatcgcttttgacaaatcaattttcacatcgccgatgaatccggaaacatttaaatcattcagctcaaacgggtccttcatcatccggagctcgccgataaaaaagctgcggaggtccggctgtctgctttccgtctgggcggaaggctttggctgctcttctttttcaagattgattttcttctctttatgttcatacacgcgctttcctttcaggagcctgtagcccgcgtatatgagaaaggcggcgaaggcatagccgaacaggttaaaggtggcgctgaacaggttcctcaaaaataaaaaagcggcaaagatatacaggacggagccgagccagccgcgggaatatttattaaaaatataacctgtaatcagaaaaaagagcggccaaaacaagaagtcgccgatgccgataatacgcaaaaacatgctgacgcctaataaggcgatgataagtccgagaatctgtttttttgccatcagctgcttgcccctcctttccttgactattgcagtgcaatattgccgctcgtcacttttatatcaatcggcctggcgccgctgcctttcatgccggtaaatgccccgccttccttactcgttttctcaaaggaataagacggccggatccttccgcttgccgtctcggcgttcaccgtaaaacttccgtctttcggcaggctgatcgctgcgctgccgctcgcaagcctgacggatacgggagcatccgccgtctcaagcgaggcgtcgacactgccggaagcgacccgcacgtcaagggcgcccgccacatgttgaagcccgacatgtcccgaggataagcggacagcccccgtttttgccgcaaggcctgctgctgtgagattgcccgacagccccttcgcttcaaacacatccgtcttcacgtgcttcagcgacatgttcccgcttacagaacggacgacgaggtgcgcaagagacagccccttgtttccgtcaacggcaatgctgccgcttgatgtatggacggtgatgtcccgatgataatcatacggaatgcggacaatcagcagaggacgctgaaagagattcagaaattggaaccctttctccttcgctttaagattgagggtctttcccctgctttggacaaacattttccccgccggtcccgtcatgtttgccgcgatatcattccgcgcttccgcgatgatttttacatccgtctgttccgatgaaaccgacaggctgttgacggcacgcggcggtatgcttgccgattccgcttctgtttcgtacagcggaaaaaaacgcccggcaaacacttctttcaccaaaaacagacagcagatcagaacggacgccgccatcagtcctttggcaatcttacgcttcattacgttccatcctttttcattcattttattataaaggaaaagccggagaattgatacgtgcgtatagggaagaggcgtaaacgcgccgatcttcccttgtgcacattattcatgagccgctttttgacgctctgttttttccagagaaagcgagcgcattttttcaatctcagcttccacctcgtctgaatattgggagcggctgtattctgtgttcgcctcagctgaagtgccgtatttgacgcggacttccatttcttcaatgcggctttccattcgaaggaactctctgtaggcgctttcgctgtcaattttgtcgaaagaagcgttcatatgttccttcgcatttgccgcgttcgcgcgggcgatgagcgcctgttttttatcctttacgtcgcgaaggcgcgtttctaaagtttccagctgctctttcagctctgccagctgtgttttcgcctgctcatacgctttttcatgttcggccgcttttccctcaaggtatttcatttcagtcagcgcctttttcgccagctcctcttccccggcgtcaaaagcaagctgagcctggtttttccgttttgccgccgtttcggaggcgtcttcctgttttttcttaaactgatggacaatcgtgtgctgtttgacaattgtttgtttcgccttagcgatgtcactttccatatcacgcacatattgattcagcatgactttcggattttctaatttatcaagcccttcgttaacagatgcgacgaacatatttcttattctttttaagaccattttgtcttcctccttattttttcttcagaaattcttcccattcagagtcaaatccggattgatagcccggtgatgccgcttccggttcatactggcgggaagcggtgtctgagccgccctgcttcatcatcttccacccgaaatacaccatggcgccggccagtccgatcgcaacgataaatggaagagaaccgacgagaatcatagctccgatgacgcccgcgatgatacccgataccgcccggccttttgaaaaacgtttgattccccagtaaagcatcaggcctccgatcgccagcgggatgataaatgcgaaatggcctcctccgaaaaagacagaaagtccgaacacaatcagcagaaagccgcctgccgttttgccatttatattcatgcagatcctcctttcgttttccttgtctttactataaacaaatcccgcggccggcaaaacgagtcagagattgattttcatatcagaccggagtcgtataagcccccggaccttcgcataaaaaaacgccgctgcaccggacggcgcagggcgtttcacgaaaaatctatattctgatgctcgcttctttttccctgatgagatctgaacgttcggctttggccagcttcgtaaagaacaatattccgagaccggacaggacttcaacgagaccgccggcggcaatgacttttccgggaccgaaggcgttagccgcgtatccgcaaagaaccgcgccgagcggaatggatatgtttgagatcatatggatgacggcatagacttgcggctggtcatcatggtccacagacgtctgaataatcgtatattccggcacattaatagcgctgacggcagatccgaacgcaaacgcggcgaggaagacgagcggcagaaaagtgttgaggccggtgatgaaaaatgcagctccttctatgattcccgctgacacaaacaggagaccgtatttgttcaccttcaccttagccaaaataaaacccattaaaaaggctccgcccgtgcctgtcgctttcaaaagcgagtagatgatcggcggcatgtttaaatcttcggcgacataaacggcagagagcgcctcccacggagcggccgcaaaattcatgaagatacaatagatggcgagcgggtataaaatctggtgtttcctgacaagaacgaaaccccgtttgagccttccgaaatacgtcccgcgctgtctgacggcgactggatcctgtttggcatgctggacttggtatgacataaaaagtacgagaaaacctgatagaagatagaatataagagcgataaacaaagaataagcgggactgataaatgttaagaacaccccgctcagcgtaatggcggcaagcctgacgatctggcctgatgactggatgaccgcattcgctttctgcaggctgctttctccgacaatattggggattaatgagatagatgcaggattataagcggctcccgtggctgaatgcacaatcatgagaagcatgacaaaccataaaggagaaaaaccgttaaagtaacagaccggaatgatcaacacgaccgccgcgcgcgtcaggtcggagaaatacatccagaatttcagcgtatgctgcttcataaaaggcccggtaatcggcgccagcatcgcctccggaaggaacgtgaccgcaatgagcagggacgtgccgatcgcgccttccccgtcaaaaatcaaaaaccatagaatggaattaaaggcaaaaccgtcgcctgacaatttaaccagccttgagataaacagaagggtgaaatttttattccagatgctctcgctcttattatatgtatccatctatcaaatcccccattattttacaatgtttcttataatatctcattttttaatttttcagtcaataatgcataagatacattttcctcttgtcaataaaggttcaattgatggatatcttataaaaaaacagccggcttgcagctgccggctgaacaaaacgttattcatcatcacggaataccgcggcgcttctttcatattctatatcctgaacgccttgtcttgcgttgaccgctcttgccgccgcgaaaaaataatcagacaggcggttcaagtaacgcatcaccgtatcatttatctcttctgttttgccgagtttgacgacgagacgctcagcccgtctcgtgacggtccgcgcgatgtgaagctgagcagccgccttatgcccgcccggaagaataaatttctcaagcgggggcgcttcagccgtgtaacggtctatgcagtcttccaatgcggaaatagatgtctctcttaatgtatagcttctatgttcagtgaccgtcgccaagtcgccgccgcagtcaaacagctcatgctgaatgtttcggagttcggctttcacatcaccgcaattctcacaatcatcaagctccgcaagcgcaagcccgataaagctgttcagctcatcaatcgtcccgtagctttcaacccgcagactgtctttatccgttctgccgccgatcaggcttgtctgtcctttatcgccggttttcgtatacagcttcatcgttgtattcctccttcttccgccgcttttacacatgccgcggttcctcttctgacggctctttccgcgtgagggacgtctattgcctctcctgtctgcaaggcacaaatgacaatgtcgccttttgcctgtctgccggaaagagcctgcattctcgcttcagccgctgccgttaacagccgtacaaatccctgttccgataaacgtccgctgatcagcacccaaacggtaagctgcgcagtcacggcaattgtgaccgaatcaaacgtacggcagatcaaaccagcggccgctgagctggaaagccggcagctccacgaaaagcccgggccgtcagatgcggttgacaacattctgaacggccgttctgtatgaagcgttacggtatttccgcttttgtttatcagagaggtgaacggaacgttgacaggctctctttcctcccgcgcttccggcatgaaagcgatcagcggtttcggcgacgatagctgagcaacagcgctgacggtgatgccgtaaatgtcttcaatcgtctcttttttcaaagcctgatccggcgtctgcttcggaaaagcgcgtccgtctttcatcatcaggagctgatcacaatattggcctgcggcatttaggtcgtgaaaaatactgatgaccgtcaggcctctttctctcgtcagccgcttcaccgtatcaagcaggtctttttgatatttgagatcaagaaaggtcgtcggctcatccagacacagcacctcaggctgctgagccagcgcctgcgccagaaagacgcgctgccgctccccgccgctcagattgcggacggattgctgcgcatatcggtcgatgcccgtcatttccatcgcttcccggacaatgtcttcgtcatgttgatccatctgtctgaagagtcctttttgatacgggtatctgccgaaagacactgtttccttaacggtaaatgtaaaagcttgctccgtatgctgcggcaaaacggccatgattttcgcaagttcccgcggcttgtacccgccgacgggcctgcctgcgacgagcgcctcgccttttgacggagagagcattcccgtcaacaatttcaacagcgttgtttttcccgagccgttcggaccgagtatgccgacaaattcaccttttccggcggtaaagctgacatcttccacaatcatccggcctccgtacccgccggacaggctgctcaccctgatcataagcgtttccctccatgatgctggcgaagcagaatcaaggcaaacacaggcgctcccgccaaagccgtcataatgccgatcggcaattcgacaggctcaatgacggtgcgggaaaacaaatccgccaaaatgagaaacccggcgcccgtcaatgctgacagcggcagtaaatggcgatgatccgttccccataaaagccgtgtcacgtggggaatgacaaggccgacaaatccgatcgtccccgagacggcaaccgctcctcccgtcagcagagatccggcggcgatcatcagccattttctttttcccgtactgacgcctaacagccttgccttttcttctccataagtcataatgtttaattctctgccattgataagcagaagcgccgtcccggccagaaaaaaaggcagaaacagcgcgacatagccccagcccctcattgacacgcttcctaacagccagcggacaatcgggagcagatcattgcccgttaaagcgatcacaagcgatatgagagccccgagaaaagaattcatgatgatgcctgtcaaaatgagcgtcgaaaccgacatcgacgcatgaacgaggcggctgaaaaacagaaccgccgccatgaccgcaatcgctgcggcaatgctgacaaccggtagtgtgaaccggccgatgacgggaatctgaatgccgaaaaacaaggtgataacggctcccgccgaggctcccgaagataccccgagtgtataagggtcggcgagcggatttttcagaagtccctgaaacgccgctcccgcaatggataacgcggctccgacaagggcagccagaacgactctcggcaggcggatattcatcataatatttacattcataggatcagccgaggatgtccggccgatcccgatccaaaaaacgtcggataaaggaatatgcagactgccgattgaaatgccgagtgccgtacaaacggctaaaaacagcaggctgaccgtgtaggccagcgggcggttactttttaaacgtttcaggataaacgctttctgcaagcttctcgacccctttgacaaggcgcgggcctgagcgtgtgacaaggtcgggatcaacagaatagacattgtggtgtttgactgcattgacggcaccccagccggcgcgtttttccacttcagcggcctttacgccgtctgtcgtaatgatgacgtccggattcattttgacaatcgcttcatccgtcagctgaacccagccggtctggctgccggcggcgtttttcgcgtgtatatcttcaagcatttcgttcataaacgtgcctttccccgtcgtgtagccgtcaggagacacttcgacgaatactttcttttcgtctttttcagaaatggccgccgctttcttttctatgccggaaaggtcggatttcatcgatttgatcagcttatccgcctgcttttctttgccggccgctttcccgatcatgctgatagatttgtacacgtcttggaacgattgcgcatcattgaccgttaagacggtgatgcccgcatctttcagttgcttcatcgcatcggcggaagcggacatagaggacgcgtgggcaagcacgagatccggcttcagcgcgatgactttttcagcgttcacattcatatctccgactttcggtttttttaccgcttctttcggatatgtatcatttgtcgtgacgcctgcgaccttatctcccagtccgagcgcgtatgtaatttccgtattgctcggcatgagggaaacgattttttccggtgcctgctttatggttactttttcgttcgcggcatccttaatggttaccgggaatgcttcggttgagacggctttttgtttggccgcgcttccttcttcctgtgcgccggaacagccggcgatcacaagggcggtgaccaagagcgccgcccagacggcagtgatcttcttcattcttttaactccccctgattatggtaaacgattgtctctttgacattcgtatccttttttcgcagtaattatactataagtctttaaggcttgtatatccggcctttttgcatgaaagcaaattgttcgtacacactaaaattcatcatgtatactgttacacaatggtgtgaaaaggaggattattatggaattacagcttgaacgaaagctcgtgttgattacaggatcaacctcaggcatcggaaaagctgcggcaaaaagctttttagccgaaggcgccgaggtgattataaacggaagaaaaaaagaaactgtggaacagacggttgaggagctttccgcttatggaacggttcacggcatcactgcggatttatcgcgtcaggatgaggcggatgacttgataaagcgcgccggcggaatcggggaagtcgatattctcgtcaataatctcggtttttttgaagtaaaagacttcgctgaggtgtctgatgacgaatggactcggtattttgaagtgaatgttatgagcgccgtgcgcctgtgccggcgttttctgccgcaaatgctcgagagaaacagcggacggattctgaacatctccagtgaagccggtgtcaaaccgcttgcgcaaatgattccgtattcaatgacgaaaacggcgttaatcagcttgtcccggggaatggcggaaatgacgaaaggcacaaatgtcacggtcaactccgtgctgccgggaccgacatggaccgaaggcgtcgcttcttacatggaaggagccgcaaaggctgccggagaagacacaaacagcttcgtccgggattattttaaagtgaatgaaccgacatcattgattcagcgctatgcaaccccggaagaagtcgccaatacgattgtatttctcgcttcatcagcggcttctgccattaatggcaccgcacagcgggttgaaggcggcatcatccgctccatttaacacaaaaaagcccggcacaatggggacttccccatatgccagggctttttttacatcatgcctgcaaacggaaccggctcccagccgcccgtctcaagctctgctgaaaacaggccgcccgcatgcggctgctcaagtctttcggtttccgtcaatttttccgtcgcggtcgtaatgtataacgtgttcaagtctctgcctccgaacgcgcagcaggtgacgtatttcgccggaacttcgatagatgcaatttccttatgcaaaaacgggtcaatccggacggcacggccgcctccgaacagagccacccacagcattccgtcacggtcaatggtcattccgtcgggagatccttgcgactttggaaagcggtagaccgttttcggatctgatacggctccggtttcaggatcgtatgcataacagacgatttcctgcgtcggagtgtcgatatagtacatcaagtttcggtcccgatcccaatccaaaccgttcgaggtggagacctggtcttttattttggcaaggctgccgtccgtattcagacggtacagcgaagcctcctcttctttgccttccatgctcgtcgttcccgcccataatctgccggacgggtcgcattttgcgtcattgaaacggatatcttcccgcatgtctctcggctgcttcatcttcgtcaatgtatcttcccgaagattgtacaggtaaaaaccgtctttcatcgtcatcaccagctcttcctttgaatacaaggccagagccgtgacaaatgatttgaatttaacggaacggttgattccgtcagccggagtgaagatatgcagctggctgcccagtatatccacccagtacaggcattgcttgtccttgtcccataaagggccttctccgataactgctctcgtatctgctcgtaatgctgcttccatgtgtgaacacctcttttgcttgtcagtcttctattgttattcccgacaaagcggcgtccaaactcaatcttttttaaaaagaatcgtaatcaccgttccggcgctgattctgctgttgacatggatggttccgttatgaaggtgtaccagctccttggcaatggcgagcccgagtcccgttccttctgacggtcccttcgtattcgttccccgataataacggttaaacagctggtgaatcgtttcatcgtccattcctcttccgttatctttcaccttcagaatgagctgttcggctgattcctcaagcacgacccgaatggcggtccctttcttattatgcttaaccgcgtttgccagcagattctccagaatacggcggaaccacgcttcatcaatggcgaaaagaatgtcttcctttttggtttcaaaggcgatgtcatagccttccgagaacgtgtttttcgtgaaatcgttcgtgacgtttctgataaacggcacgacgttgatcagccgccgttcgatcgggagggccgcgtttttgagacggtatgttaagtttaagtcctcaatcagcttggacatatattctgatttttcccggacgatctgccccatttctttgacttcttccggggtccagtcgtattgcttcgattcaagcatcatgctgtagccgtaaatcgtgctcagcggggtttttaagtcatggctcagcccggcgatccattcttcccttgtcgcctggattttttctctgtttttcttatcccgcttcagcgtgtcggtcagctgatccatcgattcgaaaatctcggcgaaaaagcggaacggctgctttgttttgccttttttgtttttgctgaccggctgtcctttgcggttcttcggctcttcaagccggccctttgataaattgacgagccatttgatggtatgaaacagcggccagccgaaacggaaagagtaccagatggtcaggatgcagatcataaatactaagattccgatcaagaggaagagggttttcatcacatttctcaaaaatgatttgttaaactcgtgatcggggatgtacacggggttcggcaccgacgcgaccatccatttcgttttatcgagtcttttaaaagaaatttcccgtttgtaattccacggcttggaactgtatttcagcaattcaagctcattgacggtgttccgttcttttttcgtgctgttgatatccccgagcagtctgccgctgtcttcgagaaggtagaccgcccctttttcccgtttaatataatcaaccgtgctctttttatattgagaaagggaagcgagggatggctcctgtgattcgatgtaagtgagaagctgctcactggcggatttccagccgaacagaatcaaataggtctcatcatttatcgtgaccgtccagtaattcagcttgtagttgtcaaaattccggtactggtaaatggataagagatcttttctgctgtaatggctcgggacgtctttcggcactctgtacgcgtagtccgttttttcattatcattaatgatctgcagccagcccttctgctttcggaccgacatctttaaaaactcatcgacgtcccatgtgccgtcttcatttttatcaagccacgcttcaaacgagtctgccgtcgctttggtcagtcccgcattggcttccgcttcgctgaaacgccaatccaaatagaagaaagaagcgacggccaaaacggacatcagcaggatgacaagcagcagctgtccgaaaaagtggagcagaaattttccgcgcattctcatgagcgggttcctttttctccttgatcgggaataaaccgataaccgaggccgcgcaccgttacaatataagacggattgctggggtctttttcaattttttctctgagcttgcggatatgcaccatgacggtgttgttgtcgccgtaagacggatatccccatactttttcatagatctgatcttttgagagcaccacatcagggtgttcacagaaatattgaagcaattgcagaagctgtgcggagcagctgacgggctcgcccccgacgatcagctcggcgttttgcggtgaataggaaaaatggctgtatgaatacgtctttaccgccgttttctcttcgcgcttataggttctctttaacgtcgctctgatccgcgccgccaattcgagcggattaaacggctttgttatataatcgtcagctcccaatgcaaatcctgacagcttatccgcatcagaagaacgggcggtcagaaaaaagatcggagcgtcggtatagttccggatttcggtgcatgcttcaaaaccggacatgccttccatcatcacatccagcacgagcagatccgcggtttcatgtttaacaaactcgatcgcttcctcagcgcttccggctgtcttaatgttgtgatagccttctttgacgagaacgcgtttgaccatatcaacgatcgccttctcatcgtctacaattaaaattgacgcattttccaccttggacgttcctttctctttgtttttttcatcatatcattatatggataagatttggtacttttttagtgcggaggtcttgcggggaaacagaaaagaaaaacgagaccggacatctcttctcgtttttctcatgttgtcagagcggaatatccatcattccgccgcttttgtcaggagctttcatttataagatgaagaataaattcccaaaaacccggcacttcctggcataacagcatgtccgctttttcaactattttaatcttcaattcttgttcaagatcttctctttcctggtatgatgtattgctcagttttttttttatcattggcgaaaaacgcgaaatcaaaagttccatttcgtcggtatctgtgttctctttgttgaagtcaaatggcccgttcactgcttattttccccctttttttgcttgtccagctgctttctgagattgtcgagcccttttttatgaatattggaaatgttctgccgtgattcacccagcgactcggcaatctccttcatcgtcgctccgtgaagataaatattcgtcagcacgcttttttgtttatcggttaacgtctgaagcgcttcgtataaatcacggttttggacatgctggctcaaatccccctgcttccgcagaaactcttcatacgcgtcttttcccatttcatagggaagcgcttcacctccctccggctgatccaccgtcagcggatagcgcttctgatttttacggatgcgcttgtcaaaatcgatggagaaaatccggatcatagagttcatatatttgatgatccggatttccttataaaactgtttaaaatggtcgtccagtgattttgcatccttctcgtctgaatgttccagcacatttttaaatttctcgtaatgctttgggtcacttaaaaaatgtttaacgatcggatgtttcataatttccttgcattttgaccgtaaaagaacttgatagtccataaaaccgccccctatttaaattaaatgaaagaaagcaaaaaaaagtaaactactcctttccgactaagattccgcactccttatgtcccggttttgccggaacaaaaaaaagaccctcaactgcgatatcaggtttacaggagccgctctttctttcacttatatacatgactgcaggtcaagtcaggaggtggctgataatggatcaggtttttatagaagaagcggtcagacagatcggcaatctcggctttccggctctgattgccatgtatcttctcacacggtttgagaagaagtttgacgccctgatcgaactgatgacggaactgaaagatcaaaaaatgaaaaattaattttcacacgaagttgacttttcaccggaacgcatcacttaacaaagcagaagggaaaacgaaaggcctttcacattctctttctgaaaaaacaaagcttgagaggagacgatttacatgtcaaaagaaaacaactgcaatatcccgcagccgatcagaggagacaaaggggcgaccgtcacgattccgcgcaaccttgaaagagaccgccaaaatccggatatgctgacgccgccggaaacggatcacggcacagtggataatatgaaattctctttctcagatgtgcacaaccggctggaaaagggcggatacgcgcgtgaggtgaccgttcgcgagctgccgatttctgaaaatctggcatctgtcaacatgcgtttaaaaccgggcgccatccgtgagctgcactggcataaagaagcggaatgggcatatatgctgacgggcaaagcgcgggtcacgattgttgatgaacagggacgcagttttatcgatgacgtgaaggaaggagatctgtggtacttcccgtcaggcctgccgcactccattcaggcgctgaaagaaggctgtgaattcctcttggtttttgatgacggttctttctcagaaaacagcacattccaagtgactgactggcttgcccacacaccgcttgatgtcatcgccagcaacttcggggtttcagaaaaagacctcgccggcctgcccgggaaagaaaaatatatctttgaagagccggttcccgggaagctgaaagatgacattgtggaaggcccgaacggtgaagtgccttatccgttcacttaccgcctgctggatgaaggcccgactgctgagacggatggcggcaaagtatatatcgcggattccacaaacttcaaagtgtccaaaacgatcgcttcagcgcttgtcgtggtcgaaccgggcgcaatgagagagctgcactggcatccgaacacgcatgaatggcagtattatatttccggtaaagggcggatgacggtttttgcatcagacggccatgcaagaacatttaactatcaggccggggatgtcggttacgttccgttcgcaatgggccactatgtggagaatttgggagatgagccgctcgtcttcctggaaatcttcaaggatgaccactatgccgatgtgtccctgaaccaatggcttgccatgcttcctgagaaattcgtccagcagcatctggatctgggcaaagactttacggatattctttcgaaagagaaacaccctgtcgtcaaaaagaaatgctgaagaagatacacaccggcttgcagagttccgtctctgcaagtctcctctgtgtgaaaaggagctgaacagatgatcaatcaaaacgggacgaaaatgtttattcttcaggtgctccggtatgccctggcagccgctgccgtattattcgggtattttatcgtgatgatggccgtattttcattagccgggacgagctacggatcgatggcgtacgtcctgcttttttccgtgctttttatttttctcggtttatgttttgaaccgcttgagcggctgatgatacatagctttaccttttttgggacgggcaggctgccttttctccttttagccagcaccgttcagctgctgttcctctggatgaccgcgtatacgaccgataaactgattgaaaagatttggctgtcaacgacggaggagctgattgtggcgggggtttttttcgttttggataaatgcgtctccggagaaaagcagccccgggcgcaataaaaaaacgcaggccggaatggctctgcgttttttttcatcataccgttgcgttttcatgccggattaaatcgtaggttaagcagaccggtttgttcgtgcgcggatcttttacaatctgtgcgtcaatttggaaaacgtctttcaatatgccgggagtcatgacttcctccgccgttccttccttgatgacgcgcccttttttcagggcgatcatgtaatgggaaaaacgggcggcatggttcagatcatgaatgaccattaaaatggtacggccctgctccttgtttaatttgtcgagcaactgcaaaatttcaagctgatgggcgagatctaaataagtggtcggttcatcaagaagcagcagctccgtttcttgagcgagcgccatggcgatccacacacgctgccgctgccccccggaaagcgcttcgatcggccggtcgtaaaattcggccatccccgtctcttccagcgcccatttgatcatgtcacggtctttatcactcaaacggcccattccggactgatgcggaaacctgccgtaagaaacaagttcgtacaccgtcagcccgctcggcgcttcaggcgtctgcggaagaattgccatttccttggcgatgtctttcgtggatttttgcatgatcgcctgtccatttaaatagacggcgccggatttcggtttcatgattcttgacatcgttttgagaaccgtcgattttccgcagccgttcggaccgatcagtgttgtaatttttcctttcgggatggcgatatccaattctttcgctatcaaacggtcgccataaccgacagtaagctgttccgccgataatgagttcatcgcggcagtctccttcctctatttcgttttcatcagcaaatatacaaaatacggcgctccgagcacggaaatcaccaggccgacgggaacttcggacggtgcaagcacatttctcgccagcgtatcggcaagcagaaataaaaatgctccgattaaagccgaaaccgggataagcgtctggtggcgcggtccggtaagccttctggccaaatgcggcgcaatgagtccgagaaaagcgattccgccggctgccgcaacacatgacgcggtcagggcaacggcgcacatcagcagaacgcgccgctccttttcaacccgggtgccgagccccgccgccagctgatcaccgagctgaagcacatttaaatacctggctttatagaggctgaacggtaaaagaaccagcagccacggcaaaatggacagcaccattttccaattggcgttccaaatcgaaccggaaatccatacaagcgcctgcatgaaatcccgcgggtccattttcagctgaaaaatcaagagaagcgcattaaaccccgcattgacgccgatcccgaccaaaacgagccggacaggtgaaacgccttttttccaagccatcacatagatgagcagcgcagccagaaaagcccccgccaaagcgctcaccggaagcagccatgtaccggccatgcttaaatcaacagctgatccttggaaaaagaagataaacagaacgaccgccaaagacgccccggcgttaatcccgagaatgcccggctccgccaagtcattttgagacacgctttgaaaaatcgcgcctgaaaccgcgattccggcgccgaccagcaatgacagcaccatgcgcggcagtctgaattcaaataaaacgagctgatcccgggcatccccctgtccgaaaaagacacgcagcgtatcaagaggcgcaatccggatcacacccatgtttaagctgataaaaaagacgatgcatatgagcaaaaacgtaacggccatgaccgccagcggttttttcgattttacattcattacagccctctcctttccctgcgcgccaaataaaagaaaaagggaacgccgataagggcggttaaagcgccgaccggtgtttcaaacggcgcattgacgagtcttgcggcaatatcactgaagactaacagaacggcgccgaataccgccgaacagggaatgatccacctgtaatctaccccgactaaaaatcgggtgatatgcggaatcaccaagccgataaaagaaatggctccggcgactgagactgaagcccccgtcaagaggacaacgacaaacattccgattactttcacaagcgatgtgtactgcccgagccctttggccagctcctcacccaagctcagcaccgtcactgagcgcgcaatcagaaatgccagcaaaagtccgataaccccgaccgccaacagcagctgcacgccttcccatttcacggaagcgactcctccggcataccagaacttcacatcctgggcgacatcaaaacggatcgcaatcgcgcttgaaagccccgttaagaaatagccgactgccgtaccggccagcgcgagcttcaccggtgtcagaccgccttttggaaacaggccgatgccaaacacaataagcgctccgattcccgctcccgcaaaggaccacaaaacaagcccagcggcagagagccccggaaaaaaagcaaacgccaatgcgatcgcaaatcctgaccccgacgtcacgcccataatggaaggctcagcaagcgggttccgcgtcagcccctgcataatcgccccggacacagctaaaaaagccccgacgagcgcggcggcagcggttctcggcagcctcagatcgcgtatgatttgatgagatgtattttgcggctgaaagtgaaagagagcatcccacaccgtccgcagatgaatatcggcagctccgatggaaacagacagagccgcgccgatcaataaaaccgcaatcccggcacacagcagcacagccgcccggaatgaacgcgccgtccactggatttcactccctgatgccccttgagccgtcattgtctgtttctttttcaatagacccaacactcgttcttcctttctcaaaacaagaatggtaatgataatgattatcaatgacttgtttcagtatagcacttttatcttctcttttaatagacctaatttcatataaaaaaagaaagtttttcttaaaaaagagcgtgcttctctatgaaagcagtgatataatcacactgataatgattctctttatcactaatttttatgaaagaaggaatgtcagatgttccatacatacaagaaaatcggcgcagcgctgattgccatgctgctcatcgccgctttggccgcatgcggcaattcttcagacacgaaaggttcttctgaaaaagaagaaaccatcacgtataaagccgaaaacggcaatattaaaattccgaagcacccgaaacgggtcgtcgtcatggctgacggctactacggcgactttaaacagctcggcatcaatgttgtcggcgcgccgcaaaacgtatttaaaaacccttattacaaagggaaaacaaaaggtgtgacaaacatcggcgacggcacgtccgttgaaaaaatcattgacttaaagccggatttaatcgtggtctggacgacacaaggcgccgatattgaaaaactggaaaaaatcgcaccgaccatcgccattaaatatgacaagctcagcaacattgatcaattcaaagagtttgcgaaaatgacaggcactgaagataaagcagacaaatggctggctgaatgggataagaaaaccgctgccgctaaaacaaaggttcaaaaagcggtcggctcaaaaaccatctccatcatgcagacaaacggaaaagacatctatgtattcggtaaagacttcggccgcggcggaagcatcatttatgacaaactcgggctgaaggccacaaaactgacgcaggaaaaagccattaatcaagggccgggctacgccagcatttcactcgagaaactgcctgacttcgcgggagactacatctttatggggccatggcaggccggcggtgacgacaaaggcgtgcttgacagctcaatctggaagaacctcgatgccgtcaaacaaaaccatgtctaccgcattgatccgatcggcttctatttctcagacccgatctcacttgaaggccagctcgactacatcacaaaaagcttaacaaagtaaccccgaagccgctgtcacagcggctttttattatgcttaaaacttgacaaaaaatttatttatgctataatttacatttttggattaacatgtataataagattctcccggccggagattgatgtaaataacggaggatctttatatgaaagaaaacaaggcgagtatgacttccctgctgtccgctttcggaagggcgtaccacagtaaatatggtgaaaatggctgcagcaagcggagaaccgatgttatcgtgtttcagttataaagaaatcgaaaaaatattagaatcatcaggtctgcttatttatgaacatttatctccggcggacgtcaatgaccgttttttcagcggacgcactgaccatttaaccgcattcgagaccattcattatatacacgccgtcaaaacgtaacccgctgccgcaaataaaaaagacatctcacagacgtgagatgtctttttgtcataccgattgtctgttgtttgcaaatttctttgagacgaaaggatataacagcaaaccgacgaagaacagcccgataccgagaataaaggtcgttaaatcggccgttccggtaataatgacataaaaagaataaatgcaggcgaggatggcgatgataccgtctcttactcttgaaccctttatctcgtcatacgtttcacccgtaaaaatgagcttcaggctgtaaaacgctgacacgagatacggaatcagataagcgagcgtcgccgccgtcgttaaaaacgtaaacgcgtcactgatcgtccgggaaataactgaaaagataaagatctgtgacatcacgttcgttacgattaacgacacaaccgggctgccctgtttattcgtttttgcaaaagcagcgggaaagtctcctgatttcgccgcttgatacggaacttcagagccgagaagaatccagccgagcatcgttccgaacagacacaaaatcgccagaatcgccatgatgacacttcccgcattgccgacgatcgcgtacaatacgtcaacaaacggtttttccgagccgacaagcttaccatgcggaagcacgcccatcgtaatcaatgttacgatgatatagatgccaagcgcgatcaataatccggtaatggtggcgcgtttcacgtcgcgctgcgaacgggcgcgcccggataagatgactgccgattcaattccgacgaacgcccataatgttgaaatcgccgcattgtggatctgtccgccgattccctcaactgtgtgaggacctgtttgaaccggaaaataaaaatgatcgaaaaacgacgtttgaaacacaaataaacctgcaatgataaagaagataaatcctaatacttttgaaaacgtcgtgacgaaatttaatttactcgcaccgttaatgctggtgacgagaatcgtgtgagtgccccataataaaaccgtacatacggcaaacgtcagcagctggccgagcgtaaccgcctgaccgccgatcgaaaacatttcacgcttatccgttaaaatcgggaaaaatgatgttaaatatccggcaaggctcgtgatgatcgccacgttgctgatccagctcgccacccagtagccccacaccatcgtgaagcccgctgcattcccttttttccgatcgctgaacagcgcacgcgcatagctttgcggccccgccgtcagctcaggcttgcggatggataagtggccgaagaccagcgcgatcattaacacaccggctcccgttaaaagccatgccgatgtggcgccgaacgggctcgcgatttttgcgagcgaactcggaagcgaaaagatgcccgagcctaccatatttcctacgacaaacgccgttaataaccaaaaaccccattttttcgtctgttccattcctgtacctcctggttgttcattcgtacggaccagaccccgagatcatatttacacgcaaaaaaagcctgaacaaaagtccatgcttaaagaaacacacacacccttgatctccggatagccctccgcgaaaaagcacgcggcagtcctgcacttattcagatacagtcccagcataaagaaggatcggctttctttacacttcggcgctgatgcctttaacacatgttttgcggcccctatcagcctggcatgtgcgactcatcatcaagcgcaacctctacctcaccgagaaagagtgaggatttttatcattcaattctactcagaggttatcagagataaaaagatctgtcaaagggaaaaattagatggaaaacggatagagcgttcgccctacccgtcttatatggtcagcggttgttttttttcttttgaacagcttcttgaagcggatcgtctttcagagctgcaccggcgtcttcaagcgcgccttgaatgacgtttttgtttttatcgctgttttttcctttttctttgttaaagaaagccatctgtatcacctctttatcaaatataggtacacctataatgtgtctttttccgcggcagaatatgcggaatccccgtctccttccttttggcggaacaggtaaagtttgttgatcaaacatgcattctcttgatatatttgtaattcaggggattttggcaaaaataaaaaggagaagcgaaaaatgacaggaaaaacacacatcatgggaggcatcgcttcttgttccgcaattgcgtattattacgggtatgatccggtccttatgacctcagcgggtgccctcggggcgctgattcccgacatatgccatacgaaaagcaaaatcggcagaacgctgcccgttctgtccaaaatcgtaagcacggtgttcggccacagaacgtttacacacagcctgctgtttatgcttattatgtttttcattacggcaacttatattccgaatccgagcatttccgccggactgatgatcggaatggcgagtcatcttgtgcttgacgcatggaccgtcaacggcattaaactgctgtttccgtccgccatccgcttccgtcttcccctttatatgagaacggggagtttttcggagcagcttgtgctggccggcttaacgattgtatcctgctattatttatacgaactggttcacggccgtatctcttaaacaaaaagcatctttcgcttttagggtgaggagtcatacatatgaagaaaacctttttcagcaatcatcggtttttatgcctgtccatcctgttcatgtggatgaaaacctatgccgtttataagctcggttttgatctgcagaacaactcggttcttgaggaatgtctgcttctcattaatccgctgagcttcattgtgccgctgttcggcattgccctcttgctgacagaaaaaaaacagcggatctttctgctttcggcaaatgtgatgctgacgggaattttaatcgcgaatacggtgttttacgggttttatattgattttatcaccataccggttttgtttcaggcgagcaatatgggcgatatgggaagcagcgtccaagagctgtttcacccgctttatatcgctttatttttggatattgcggttttgttttaccttggtaaaaggcataaagccgataaagggaaagccagcacccgtaccgttaaagcgtatgcgtgggcatcagccggcctcatgctgtgcaaccttgcactgtctgaggccgagcagccgaagctgttcaagcacccttttgatcgtgaagcgctcgtaaaaggaatcggcctgttccactttcatttgtatgacaccatttcgcagacgctgaatgcaggggcaaaagcgtttgccgatgaagacagccttgcggcggtcgcgaattacactcaagccgactacagcaggccgtccgaatcaaagttcgggctcgcaaaggggcgcaatgtgatttttgttacgctcgaatcaacacagcgttttgtaatggatgagcgggtcaacgggcgggagattaccccgtttttaaataaactgcggaaaaaaagttatgacttcactcatttttatcagcagactgaacagggaaaaacctcagattcagaattcattactgcgaattcgctgtatccgtcttcaagcggcgccgtttttttcacaaaaagcggccaccggttcaatacgatgtaccatatgttaaaagaccgtcaatactattcagccgttctgcatgccaatcataaggccttttggaaccgggatgagatgtacggggcattcggaatcgaccgttttttcgacgcggatgaatttaaggtgacacaggaaaattcaacaggctggggcctgaaggacaaggaatttctcgaacagtcagcggaaaaattaaagaagcttccgcagccgttttacgcgagcctgctgactttgaccaaccattttccttttgaaattgataaacaggatcagctcattgaggaaccggacacaagcagcgagttattaaaccgctatgtgacgacggtccgctatgaagatgaggccctgaaacactttttcaagaagctgaaaaaagaaggactgtatgacaacgcgatgatcgtcctgatgggagatcattacggtatatccgaagcccataatcaaggacttgccgaattcttagggaaagaggaaatcactccgtttgatacggttcagcttcagcgcgtgccgtttatcattcatattcccggggtgaccgaccgtgcgccggaaacgattgcttcggccgcgggacaggttgatgtaagaccgacgctgcttcacctgctcggcattgaaacgaaaggcagcattcagttcggcaatgatctgttttccggagagcggaccccgtttgcggtactgagaaacggcagctttatcacggatgatcatatttatacgaaaaatacgtgttacagccgtaagacgggtgaaccgctttctgacatgagcgcgtgcagcgatgagaaagaaaaagcggaacaagagctgatgctttccgataaaatattaaacggcgacctgctgcggttttataagcaataaaaaaatccctccgttatatggagggatttttcatgtttcatatataagccgtccggtcattttcgtatcatatccggataattgagaaagctgagacttgaattcctcagaattaagaatgtcctgcacgctttgaaaaagctcccggttttgttttaagacgaccacatcgtactgctcactgatcaccgggataaagtccgtgcccgccatatgcgccgcatgctgcgacccgactccgatatccgcctttccgcttgatacttgtgaagccgctgacagatgatccgtgacaatgtcatgatagccggcgacatcagacggcgtaatgccgaaagatctgagctgttcatccagcagcaccctcgcgcctgatcctttttcgcgattgacgatgcggacatcttttcggctcatgtcctgaaaaccctgaatgttcagcggattaccttttttcacatataatccggcctgccgaagcacgacatgaaaaagcgcaaacggctcccctgaaagaatgcgcttcacgtacgggatgttatactgccccgtctccccatcgtataaatgcagactgacgatgtcacaggccccgcggtacatctcgatcagactgttcaaactgccgctgtacttgcggagcggagccgcctgtattgtttgttccagctgtttgctgaggaggtccatcgacacatcctgcccgctgatgataacggactgccttttttccggctcccgcccgcgggacgggtcaggcgcttctgatacggatggcttttttgacattctcatgtttgctttatattgttttaagtcctcttcatcgaccctcatctgtcttccgaccctgtacgccggaatgagtcctttttttatcaaatcatatactgtcagtttggagaccttcaaaaggcccgcaacttcttctattgtataggaagtggcttctgtcatattatcacgctccgtttttattataactgttcagatattgaaaaaaaaccgcaccaccacgtacaattgcgttataattagtttgatctaatgatatttagctataaggggtgcacaatgttgaaaaagaaagcgacactactaacaactgcggctatggccgttttcctcgcaactgcgggctgctcttccggacaatcgtccaaaggcggacaaaacgaaaaagtcacgctgaccgtttctgcggcagccagcgctcaggatgcacttgaagaaatccagaccaactacgaaaaatctcattcaaacgtaaccattcaagacaacttcggatcatcaggcacattgcaaaaacaaatttcacaaggcgcgggagctgatttattcttctcggcagccgaagataaattcgaaaagctcgttcatgacggagatatcgacaaaaaggacagcacggatcttttgaaaaatgatctcgtcatgatcgtacctgagaaaaacagcgcacacctgacacatctgaatgacctgaaaaaagacagcgcggaaaaaatcgcgctcggcacgcctgaatccgttccggccggacaatacgccaaacagtcattgacggcattatccctgtgggacaaggtaaaagataaagtcgtctatgcaaaagacgttcgccaggtgctttcttatgttgaaaccggaaatgtcgatgccgggcttgtctataaaacagacgcgctgatttcgaaaaaggtgaaaatcaccgatgaagcgccggcgaaaacgcacgatccgatcgtttatccgctcggcatcgtcaaggatacaaagcaccgtaaagaagcagaagcgttttgtcagtatctgcagtcagatgaagcgatgaaagtgtttaagaaatatggatttactgccaattaacattacggcttcggaatttttcaccccagtcgcattgtcttttgaggtggctttggcatcaggcatcgccgtcatcattctcgggacgcttgccggcgcctggatggcgaaagcgcgatttcccggaaaaacggctgtggagaccctgtttatgctcccgctcgttcttccgcctaccgttgtcggcttcattctcattattattttcgggaaacacagctttatcggccgggcgattgagcggatttttcaccagcccgtcattttcacgtggtcggccgcggtgatcgcttcggccattgtcgccttcccgcttatgtatcagtccgctaaaacgggcttcgccgcggttgatgctgacatcgagggagcggcgaaagtagacggagccggcaggtggcaggtgttcacccgtatttccgtcccgcttgcctttccctccctcttgaccggaagcattctcagtattgcacgtgcgctaggtgaattcggggcgactttaatgtttgcgggaaatattcccggcgtcacccaaacgctgccgacagcgatttacgtcgcgatggactccggcaatgaaacactcgcctgggtgtgggtgatctgtattgtgatcatttctttcctgatgctgtttttcattcaattgaaaaaacccgcttgaccgatccgccttccgcgcacctttcgccggaaggctttttgatttaaaatcggatggtatataatgaaacaaaaaacacacaaagggtgcggccatgaagattaatgtcattatcgcggatgataattctttcatcagagaaggaatgaaaatcattttgcatacatatgaggaatttactgtatcggcaacattggaaaacggactggaggcggcagagtattgtaaacacaatcccgtcgatatcgccttgctggacgtccgcatgccggtgatgaacggcgtcgaagccgcaaaacggatcgcggaggaaacggatacgaagccgatgatcctgacgacatttgacgacgatgagtatattttagaagcgattaaaaacggcgcgaaaggatatttattaaaaaacaccgaaccggaacggatacgcgatgcgatcaaaagcgttttcaacggacacagcattcttcaggacaccgtgctggataaaataaaagacagccttttccggccggcggaagccgcgcatcagattgatgaaagccagtttactgaaagagagctcagcatcatgtcgcttattgcgaaaggactgtcgaacagggaagtttcaaaacagcttttcatttctgaagggacgacggccaattatatttcatctattttagggaaaacagggcttgagcacagaacgcagatcgcgatttattatatcaccgggaaggtggataacgggcgttgaacggtatggatttttggatgctgatgagcagactgatcgccattttttatacggcttttttgtttgtatcggcagaccgcccttacacaccgtacgccgtcttgtttctgctgctttatctatctttgggcattgcggtctgcatgatcaggcagaccgcttggaggcgcgggatcaccctcatggcgctggcattgaccgcttggctttccgccttaggccatccggcgtttctatttcttttgccgcccgccatttttgcggttcttgccgaatatccggttcaccgctatgtgttctgcctgctcgtgtttttgccgtttttatttatcccgtacggcgaccttccgacttatatcgtcatgacgttgttctgcttggcgatattcgttttggccgcccggtccagcgaccggctgaaaaaatatgaagagcagtcagacaacatgcgctcaagcattgaaaaactgacgaaacagctgcacagcagcacagaatatatcaaacaatcggagtataccggcaaactcgaagaaagaaacagattgtcccaagccatccatgacaaaatcggccattccatgacaggcgcgctcattcagatggaagcggcgaaacggatgctcggctcccatccggacaaagcggctgaactgctccaaaatgccattaccatttccaaagagggcatagaggatatccgtattacgctgaaaaatatgaaaccgcccgctgaacaaatgggcattcacagattaagaacgtttattgatgaattttcggccaaaaacgggatgccggttccgtttacgcatcaaggcgatttggacaggctgacgcaaatgcattggagagtcattcaggaaaacgtaaccgaagccttgaccaatgcaatgaaatacgccgatgccacgcagattttcattgatatccatgtgctgaacaaagccgtgaaagcggaagtgaaagataacggaaacggcgccgtccgctttaaaaaaggcctcggcatgctcggtatggaagaacgggcggccgtcttgcacggaaccgttatttttgacggcacggccggtttttccgtcacgacattgcttccggttgaataagtgaatgttttcatgtgaaaaatatgaagattctcatgtcaaaggaatgaacagctgcactaacggccgttcattcttttttttataataagagcatcataagacatagaggtggaaacatgaacattttggagctcaaacagctgagtaagaaattcggtgattatgccgccgttgaccagatgtcgcttgccgtaaaagaaggtgagattttcgggtttctcggcgcaaacggagccggaaaaagcacgacgatcaatatgatctcaggccttttaaaaccttcaggcggagacattctgtttctcggaaaagatattttcaaatatagcaaagcaacgaaaatgaatatcggcatcgtccctcaggacctcgcgatttacgaagaattaaacgcctatgaaaatgtgaagttcttcgccgggctgtacggcctgagaggggcggctctgaaagaacgggtcgaggaggccctgacattcgtcggcttgagcgataaacacaaatatttgccgaagcatttttccggcggaatgaagcgcaggcttaatattgcgtgcgctcttgcccaccggccgaaactgatcatcatggatgaaccgacggtcggcattgacccgcaatcaagaaattatattctgcaatcagtgaaaaagctgaatgaaatgggctgcacgatcatctacacgagccactacatggaggaagtggaagaaatatgcacgcgcatcgccatcattgaccacggaaaagtcatcgcagaaggcacaaaagaacagctgacctccatcattaccgacacgaaggacgtcgtgattgagctgtcatccggaaacggcatcagcctcggcgatattcaggagctgcccggcgtcagagccgccgcactggaagaaaacagcgtgaaaatcagctctgacacaggggtcaacaatttaaaccgcctgatccggtacttcatggacaaaggaattgaaatccgctccttgcaggaacaggcccctgacttagaaacggtatttctcacgctgacaggcagaagcctgcgcgactgaccccactgaaaggaggattgcaaatgaatattctgcacatcgccgggaaagaaatcaaaatcagttttcgcgacagacggacttttattttcatgcttgcttttccgatcgtcttcatgctgattttcactgcggcattatcaaacgcctttgattcagaggtgacggtcggaaacatcaaggtcgtatatacggaccagtcaaacggccctctttctcatgatttcactgagtttatgaaagccgcaaaaaaagagcatgtctattttcaaaaagcggacacggaggcaaaaggcaaaaacgtggttcgagaaaatcaggcggatgctttcgtcactgtaaaaaacaccggttttcaagtctatacaaatgaccggagcggcataaacggcacgatcgtccaaggcatgctgaccgcttttaccaatcaatacaaagcaggcgccgccgcttacaaggcgcataaggcgccttccgccggacaaatcaaaagcgattatatgaagcagacgtctttacacaaagcgaaagaaccgaaagcgaaagatttttacgcgatatccatgacgacgatgatcgggctgtacgcctcgatttttgcaagcagcttattccgcggggaaagaatacggcacaccgcagatcgcctgatcgccgccccgctccggaaaagcgatatctttctcggaaagatgctcggcattttggctgtgaatgttctgacgattcttgccgttgtcgccttcagcaaatttatcttaaaagcgaattggggcagccacatgggacttgtgcttttgattctcgtttctgaaattcttttggccgtcagcttcggactcagcctgagctatttgaccagaaaacccgaaagcgccagattaatcaccgtcatcatcgttcaggtgatgtccattatcggcggcgcctattacaaatatgaaggcggaggaatttccgccctgtcgcccttatcctggatcaataaggcgattaacagcatcatttacgcaaatgatgtatcagcggcatggcctgcactcggtttaaatacagcattggcggcactctttttgctgatcgccgcatttaaatttcaaagacgggagggactgtaatatgaaaaacttctggtggctgtttgcgcacactctcaaagggattacaaaaagcaaaaaacagctcattctttatatcggggctccgctgatcggcgtcttcctctccttcatgaccaatgccaacggcggagccgaaacgctcaatatcggcattctcgatcaagacggcggagaagtggcgcaggatacggccgcgtttttaaaaggactggatcatgtgaagatttcggaggaaacggctgcgtccgccacatcaaagatcgcttcaggaaaaatggaggcgctcattacgtttgaaaaaggcttctcccaaagcgtaaaagacgggaaaccgtctcacatcggcatgacctcgctgaaaggcgcccaggtcaccggatatgtcagctcttatttgtacaattatatgaacagcatcgcctcaatcggcaaatcctccggcggagacgcaaaggcctttcaggcgatgtacgccgatttcaagcattctcccattcaaacggagtccgctgttttacaagatacatcgaaccataaagaaatgacttactcagtcatcgggtatctcattatcattatgctctattccgcaggcaacctgacggaactaatgattaaagagagagaaaacaggacatactacaggcttctgtcaacgccgatcacatcaaagcagtatgtattggcgaacgcggcggtgaatatcattatcatggccgtccaaattctattcgccgttctctttatgggcgccgcttttcatattcatacgtcattcccgctgtggcagctgttcgtcctgatgatgctgtttgcattaagcgcgatcggggtcgcctttattgccgtcggtttttccaatagcagcgcttcggcatcggcgcttttgaatttgatcgtcgtgccgacatgcttgctggccggctgcttctttccgggcaatattatgccgaaaacggtgcagacaatcgccgaatttctgcctcagcgctgggtgctcgatacggtcgatcaattgcagcaaggccgcacgttccaaagcctgatgctgaacatcatcattttgggagccttcgccgccgccctgttattaatagccgcatacaggttcagcgtaaaacgtcagacacagacatttatgtaaagaaaaacagccccgtaaagggctgttttttcttagaacagaagctcgtccggattcgggccgacacgctcgtctttgttcaatgcgctgatcttttccatttcttcctgtgacagttcgaaatcaaaaatatcggcattttctatgatgcggtgctctttaatcgatttcggaatggtaacgacttcgttctgaagatcccagcgcaaaatcacttgagcaaccgatttgttatgtttttccgcaatttgtgacagcacttcgttatcgagaagctgtccctgcatcaatggagaccaagcttccacttgaatgccctgcgctttgcagaaatctcttacttctttttgagtcaggcgcgggtggaattcaatctggttgaccatcggcttgatttcagcatctttcagcagttcttctaaatgatgcacttggaagttgctgacgccgatggcgcggattttgccgtctttgtacagcttttcaagagcgcgccatgtgtctttatatttatccttgcccggccagtgaatcaggtaaaggtcgaggtaatcgaggccgaggcgctcaaggcttttctcaaacgcgtcaagtgtcgtttcgtatccttgatcttcattccacacttttgacgtgatgaacagctcttctctggcaacgcccgcagctctgatgccttcgccgacaccctcttcatttttgtaaatagccgccgtatcaatgctgcggtagccgtttctgattgccgcttcgacggagtccgccgctacgcttccgttttccaccttgaagacgccaaggccgaaccacggcatttcaacgccattatgaagctttacagtatcttttaagctttttgccacgttgaaccatcctttctagtcattatgtaaacggttattattatctcacatttccgccgtaagaaaccaattatacgctcatcgtcatcacaaaaaccatctttagtgcccaagcaccacttccgttattattttcctatttttcaaaaattccggttaaccgggtaactgtccgggtaaatcgctactgtagccaccacacaattgaaggaggaaatcatatgaaacgtatgcgtatcccgatgtccgttgcccttggcgccgctttgtctctgactcctctgtcctttgtatccgcaaaagaaaccccggtccctcaaaacatggcacagcaatcatcagatgcctcagcaaaagatgtcggattaaacattgacgttgacctgctcggcatcggcaattcgattgctgacgcgattaagtcggcgcaaaaccgtgacggcttcgtcaaaaacttaatggaatcttcattctacgcttccggacaaaaatataacgtcatggtgtttaatttaagccaggaatatgaagatcattttaacggtgttcagttctacggttccgccgtttatgacggcatcacgtacggcatttgggtgtttgaagacggaagcttcaccaataaaggtgatggcggctggatcaactgggccttcagaggctggtttgaccgcgacggcgatcacgtcgaattccatcgtccgtaatcaaaaaaagtccggcgacagatgccggacttttttgatttattcatctccgtcaagcatggccgcttctacatcattgatgtattggcgaagctcatgtgacatatcgcgggaaatttcccgctcttcgaacaatgtttggatttcgttgcggatggcctgcacggcccgcagtttgatttcgagtttttgattttcaaaacggcggctcggactctgttcgtgatacgagtgccccagcctgaaaatcaagtgattgtaaaaggaaatgacggcaagcgtcacatctttattttcttcagtcatgtgttttttcaggctttcaatggccgcttttgccgttttaacccttgtggcgcggatgaggccttcttcatttaaaatcgtcatttccggctttttttgttcaccgaaaaagatccagtacatcaggcgtttcagctttttcttagataagccgactttaaacggattcgtatacagcacttccagttcatcaaaccgttcctgaaggctgtcagccgtttcttccggtatgtcgccccgctcaatcagccgcagcaattcttcctgttcagcctgtatcccttgggcgcggactttccgctcatcttttttcgtgcggtttttgacggtgaactgctgaaatctgagatttttcattttctcattgtattcggcaatgaccgcaaaagaagccgttttgtttgtctcattcatattttctttaatggcggttaaggcagcctttatcagcttccgtctcgctgtcagcaatttgactttcttctctttcacattgtcttccggcttatctgtcaaaatcggcagtacgattgtcgccagcaccaatgtgcacataataacacccgcggctaaaaagagaatcaaattccgttcaggaaacggtgagccgtcagagagcacgtaaggaatggaaaaggaacccgcaagcgtgaccgctcccctgacgcctgaaaccgaaatcagcagggtcgagcgcaggccgggtttataaatgctctgatccttgttaaaaaaccacttgccgttccaaaaaaacagcacccacaaaaacctgagaatcattaacgtcagcgtaatgacgataatgtacccgatgaccatcatattgttaaacgcggtatcattaaagatgacggaaaccacatccggtatttgcgcccctaaaataacgaaaacaagaccgttcagaatgaacaaaataatattccacgtacttgaagagacgatttgcagtttgaccatcgttgattcaagacggtcctgctccaccgcatgcgtgatgccgccggccacaacagctaaaatgccggaaacgccgatttcttcagccgcgagatagatgacgaacggcgtcagaatttgaatcagcatatgcatcgtgacatcctgcatgccgaggcggcgcaaaaacagccggaaacggataatcaaaaaagaaatgacgacaccgctgagtaaaccgccggctgaaatcagtacgaaactgaaggcggcctgcgccagcgaaaatgcgcccgtcacggcagccgcaatcgcaaatttaaaagcgaccaggccggatgcgtcattcatcagtccttctccttcaaggagacgcagaatgccttttggcatcttcactcgccctgacagcgcgctgaccgcgacaacgtcagtcggtgacagtatcgccgccagcccgaacgcggcagccagcggaatgctcggaatcatccaatgaatcgtgtaaccgccgacaatcaccgtggcaaacacgagcccgagcgcaagcagcagaatcggcgctcttaaattccaaagttccgcacgcggcgtccgttttccatcgttaaaaagcagcggagcgataaacaaaacaaaaaacaattcggtattcagttcaaagtgaagcccctgcggaaatgacgccgcaatgataccgagcgccacctgaatcaaaggcaccgggataaaggggacaaaccgatttacgatatttgagatcgcgatgatggttaaaagtacgagtacgactaaaaatatgtccaaagcatgacctccttcatctgctgcatcatatcattattgcctgatctctgcctttgccaaaggccggagccgatgatcgggcagattcaatatattttccgcacgcaaccattcttcttttattttacccgtttttatttaaaatttctcataacgtgctcacggggaactttttttgccttcagctacattttttccgaaaaaagaaaaagcctgttttctctgaaaacaggctttttcgcaagctgcgtcatctgtttcatgacgcggtgcagcgtttatgcttcttagtaaaggatagagaacgcaccgtcagtgtgtctctatccttggttttaagtgctcatcttattcgtgaaaattcgtgccgtctgtcgtcgctttaatgatgccggcgcggatgacgaaatcgccgaagtgttcgccttcctcacgctctttcgcgtagcgcgggagaatggtgcgaagctcattcagaatttcttcttcaccgatattttcccggtacattttgctcaaacggctgccgtcaaacgccgctcctaaatacatattatattttccgggcgcctttccgataaatccgatttcgccgagcgcatggcgggcgcagccattcgggcatccggtcatacggatggtgatttcttcatcccgcagcccgttttcgtcaacaatgtcttcaatcttatcaatcaatttcggcagataccgctcggcttcggccatggcgagcccgcatgtcggaagcgcgacgcaagccattgaactgcggcggagggcggaatgctgccggccgtctgtcagaccgtattgttcgattaatgcgctgatttgtttctttttctggctcgagacattgccgataatcaggttttgattagaggtgagacggaaatctcccgtatggactttggcgatttcacgcaatcccgtcatcagcttataattctcatagtccgtgacgcggccgccttcgataaacatcgtaaagtgccatttaccttttacacccttcacccatccgtaacggtcgccgttatggtcaaaatgataaggtttcgcttcatccagctgccagccgaggcggttttccagctcggcttttacgttttccagcccgagacggtcaacagtgtacttgaatctggcattctttctgacggaacggtttccgtaatcgcgctgaatcgtaatggttttttccgctacatcatacagctgctccggtttgcagaagccgatgacttttgaaagctgcggataagtggccgtatcgccgtgcgtcattcccataccgccgccgattgcaacgttgaatccgataagacggccttcctccacgatggcaatgaagccgagatcttgagaaaagacatcgatatcattggacggaggcacggcgattccgattttgaatttccgcggcaggtacagcggcccgtacatcggttccgtttccgtgtcaggagtgcccgccacacgttcctcatcaagccagatttcatgataggctctcgtgcgcggaagaaggtcatcgctcaatttcttcgaccattcgtatacttccgcatgaatttcagactggtgcggatttgaagcgcacatgacgtttcggttgacatctccgcaggccgcaatggtatcaagcagcgccgcattgattttctgaatcgtttttttcatgttccattttaaaattccgtgcatttggaacgtttcacgcgttgtcagcttcaatgtattgtttccgtatttttgcgccagttcatccatgacaagccattgttccggagttgacacgccgcctggcatccgaacgcgcagcatgaactgataagccggttcaagcttttgtttttgacgttcattacgaagatcgcggtcatcctgcaagtagcttccgtgatgcttcatcagccggttgtcatcgtccgggatgccggctgaaatccggtcgagcatgacttctttcaatgtgccgcgcaaataatcacttttttctttaatttcctcaacatcacttggagggccttccggcgcttttaaaatgttgttcaccatgctgaataagctcctttcaaaccaaaatcaatatacgtcacgctgatagcgttttttctgctgcatgtctgccaggaagctttccgctttttcacggctcatgccgccttcttcctgaatgatatcgagaagcgcctggtgcacgtcatgcgccatatgctgttcatcaccgcagatgtatacggcggctccctgctgcagccattcatacagctctttgctttgttctttcatgcgatgctgcacatatactttttcctccgaatcccgggaaaaagcgacgtccatttttgtgagaacaccgttttgcagccatttttgccattccgtctggtacagaaaatcagtgacaaagtgctgatccccgaaaaacagccatgttttcccttcagctccggtttcttcacgctcctgcataaaggaacggaacggcgcgatgcctgtccccggcccgaccataatgatcggtgtatccgggttttccggcagcttgaagttttggttgtgctgaatgtaaatcggaagcgtatctcccggctggagtctttccgcgcacagaatgctgcagacgccttttcgttctctgccgtgcgcgtcatatctgaccgctccgattgtcagatgcacctcttccggattcgcttctaaactgcttgcgatcgaatagagccgggccggcattttacgcaggatggaaagaaagtcttccgctgtcgcttcccacggaccgaaatcccggacgagatcaagcagatcacggccgttgatgtacgctttcagctgctcttcgtttccttcggccagaagttcactcagcttttggtcagccgtaaactgtgcggccttttgcaggaacggttttgttaaaacggttatttcaaaatgagaagtaagcgcatctttcagcgggaggcgctctccttgtttattcaccgccacttcctgttttgggtcccatttcagctcattgatcagctcatcaacgagcgccggatcattttccggatagatgccgaggctgtctccgggctgatacgcgaggcccgatccttcaagcgaaagctcaagatggcgtgtctctttattcgaaccgcgtccgttcagattgatgttctcaagaacctccgcccgaaacgggttcgttctggaataaacggattcaccgagagccggcgtctcggcaggcgcttcggctgtttgatttcccgctccttcgttcaaaccgccgatgaccgcgtcaagccattcagaaaacggctcatcataatcaagatcgcaatcaacccgcggcgcaagctgggtgccgccgagctcttgaagacgctcgtcaaactctttgccggtctggcagaaaaattcatacgagctgtccccgagcgccaaaacggagtaacggagcgcttcaagcttcggcgcgcgtctgccgtgaagaaattcatgaaaggccagcgcgttatccggcggatcgccttctccgtgcgtgctcaccacgatcagtaaattgtttatttttttcagattattcggcttaaaatcgttcatcgacgcgacggtgacctggaatccccgttcctcaagcgtctttaccgtctgtttcgcaagaccttccgcatttcccgtttgcgatccgtataatacggtcacttctcttgagactgccgggctttctgcaggagccggagcagcgggtgcggctgtttcaccggattcggaccgggccgcagccaaataaccgctcagccagattttctgtgattctgtcaaggtcggcagaaggcggttaaggagctctgcctgctcctgattaaacggactgttcatgacctgaagttgcaacgatatccacctcacaaggaattaaacgtaacgtacgttatttctataggaattgtcaaaataatattctaattgaaactttaccgaaagtttgtatgtaagtaaaatatataatcatgatgacaacgattaagattactaatgataaaaagccctttgcacttggcaaagggcttacacgaataagccggcgggcacttctttaataaaaggagagtgttctcccggagacaatacggtcagatgatgcatcgcccgcgtacaggccgtatataacagcttacggtcatgttcgcttttgtactggacagcagaggcgtcagcggcaatgacggcgtcaaactcaatgccttttgccaaataaacgggaatgacgcatacccctttttgaaaaggctggttttctttattgatcaagcggacaccgctctcggcgctgactgcctgaaacacttttttggcttccgcggccgttttgcagatgacggcgaccgtctcccagcctttttgtctgagctcccggattgtatccgccaattgttcctgccgcgcattttctgtatccgtccgcaaaacacgcggtttttccccgttccggttaaatggctcaatgtcatcgccgtcagccagcagcgctttcgtaaattcaacaatctgccgcgtcgatctgtaagtccgcttcaggctgacatacttttctgcaccattgcgaaagcagccggcgagggaagaagggcccgtaatggtgtgggcataaatcgactggctgacatcaccgagcaccgtcatctttgccgctgggaagatgctttgaatatacgtgagctgaaatggggaataatcctgcgcttcatcaatgaagacgtgcttcatttgtgtgttttttctttttccttctaacagatcctgcaaatacagatacggagcggcatcttcatacggaagtgatcgttctgcaaatgcgtttctggtcaaagcgccgatgctctcccaatgatcgggcttttcatcagctccccagtctgaaaacagccggagatacatccgttttatatcgagaaagccgagccgtctgacggcctgcttaatcggtttaaaggctttgccgacaataatggcgccaagcagccgctgttcgcgctgatggtcgtcaaatgcaggttcatcatctgccgcctgcttcttgagtgtttgataaacctcagcatagtcttccttatcaagcagctcgctctcctgcaagacccattccttcttacgctcctttttttcgagagcgctgatttccgcgagaagccattccgctgtcagctccgctctgttcggaatcggcagctgctgatcaagcgaataaaaatagtcttcaatccgctcttttgaaatcaggatgtctccccggaagctgatctgtttacacatcaggccagagccggaaagcgagcaggcgtagcggtcaatcatggcctggaaagctgatgacgctttgtaagcaatggctgcgagccttacggaaagtgcgtcctgattttgttcagtcaggcaatattcaagctgctcgtacgggctttcacaatcaaactttcgtccgagccggcggatgatatattcctgaaaggtggcctgctccatattctcttctcccaattccggcaatacggcggaaacataactgttgaacaaaatgttcggggaaaacaatacaatctgacgggcatcaagcaccccgcgcccgcggtacagcaagtaagcggcccgctgaagcgccgcggatgttttcccgcttccggcggctccctgaacaatgagatatttgcttttttcatcccggatgatttcgttctgttctttttggatggttgacacgatgtttttcatatgctgtccggaatgcccgctcagcacctcttgcagcatttcgtcaccaatcgtcatatccgtgttaaacatcgctttaagcgtcccttttttaatgataaactgccgcttcagtgtgatgtctccttctatcgtttcttcgggaacttcatagcgggcttttcccggggaatattgatagtaaagagatgagatgggcgcgcgccaatcataaatgagaaattgctcgttgttttcatccatcaaagaagtcagcccgatataaatccgctcggaagaggactcccctttttccgtaaaatcgacacggccgaagtaaggagaggttttcagcttttggattttttgaagctgccggtattgaagccgatgcgtccgttcacgttctgaaagcatttctgcctgctgtttaatgcttgaaaatgtctcagccgcttcgtgggcgtcatccatattcacggtgacatcatcccaaaacgtttttctcagcccgacaatatcctgcttcaatccgcccgatgaggcttcaagatgagtttgtttctgttccagttccttcatgacaaaattgattctttcctgctcttctttccactctttatcacgttttgccatcagcggcacctccgacatcaagctgacaaatccggctttcatcatacaaacatatatgcaacatattattcagcattatggtcaaataccctttttcttatcatatcgggcgtctttttttatcagaagccgttatgaaaaaaaaccgatttctttatgaaatcggttttttactgatctatatgataggaacgattcggcaggcgccacctgaacacataactgcagatgcggcatgccacaagcacaagaaacagcacatacaaaccggcggcatccccggcccagccgaggcccacgattaaccctccgagcgcggcccagactgcataaatttccgccttgagcacaagcggcttcctgcccgcgagcaaatcccgtatgatgccgcccccgctgccggtgaggaccgctgccgcaatcaccgcactgagcggatggcccattttcacggcatataaagcgccttggatggcaaacgccgaaagcccgatggcatcggataggttgccccatttactccaatgtcttaacagcagcttcggaaacaaaaagacaatcgtaactgatgcgagagcgatttgaaaaaacgcgccttgctcccacaaggcggagaccggaacaccgatcagcagatttcggatcgctcctccgccgaacgccgttacaatccccaagatgtacacgcctaaaatatcatactcctcttccatcgcaacaatcgctccgctgaccgcaaacgcaatgatgccgattacactaagcagctcccaggccattccatatgctcctttttatttgttaaattttctgacgaccattagattttataatcgctttctcttaaaatcaaccttatttttgaaagattctgattcctaacccgggacaacctcactcgcaacggctgggagcaagaacatttacctattttatactattttgggaggtttattggaagtttcattgaatactttctctaacaaaaagggggttatgagatgaaaatcagttcacttgtttttcctgttttattggccgccggattaattcccggcctgccgtcagccgaaagccatacgcattcgcacactcatgcggagccggcgaaaacggtgtatacggacccgcttccgaaagccgatcattttaaagatctgaagggcccggtccaagtcgaacagacggttgacacaaaaattctggatgaaaacggcaagcaggtcggcacgaaacgattcaatgccaatgtcagtcaggataaagcctcaactaaagccagcacgggcagccagaaggtcagagtgctggcggtggcggacgctgaataccgcgccaaatacagcgactggcaaacgcgaatcgtccagatcgtggagcaggcggatgttgcttttaaccgtgatcacaacattgatttcgtcgtacaggccgtgcaggcttggaattcctcgggctcaaacagttctcagattttatcgaatctccaaggcagcttcagaaatcaaaattatcattttgtcgtcggttttaccgcaaaatcaagttttgacgccggcggtatcgcgtatgtatataacggcaaaccgagcggcccggctttcagcgtgaaccttgatcaaggaacggccaacacggcgaaagcggcacagcacgagttttcccataacttcggacttcagcatgacgcccaaggcagcggcatccgctgcgtcatgaattatgattatgcctattccgtggatatttgggacagctcccataacagacagattgagacaaacaaagcttggtacaaataatagaaaaagagccgctcccatggagcaggctctttattttgccgtgcgttccgttttgacaaaacacatgcagataataatgagaataaatgccgtcaatgccaggaaaggaatggtaatgaaaccgaaccagttaatatattcagatgagcaaggcacgccgtagacacacggcttgatgccgctgaaaccgggcaccttctgctcaaggtaatgcatgatcgatataaacgcgccgatgacggccatcggcagcacgtatttttttacgcgcgtgtcaccctggaaggtggcgattcctaaaatcaggacaagcgggtacatgagaattctttgataccagcacagctcgcacggtatgaattttctgatctcgctgaaatataggctgccgagcatggcagcaagagctatcacccaagaagcatataaaaatacgattctatttttcatttttcagctctttcttaatcgtttttgaaatctcatcataatcagagaattctttaatcactttgtcatttacgtaaatcgtcggtgtcgccgtaatgtttaatttatcattcaggtcagtgtcagctttcagctcttttgcaaatgtctctttatcaaggttttccttcagcttgtcaggatcaacctttttcgcggtgcttttgaccgttttttcaagcaatgcaggcgtgacccattcctgttcgcttgacggctgctgttcaaacagcttttcatggaatgcccagaatgatgccgggtcttctttccacacctcttctgaagcaagagccgccagacgcgagccgcttccgtggtacatgacgttcacaaatgaaaatttcacgtcgcctttatcgataaaatcttttttgattttcggaaagatatcgctgttaaatactttgcatgacggacacttgtaatctccgaattcaactaccgtaacaggggctctgtctttgccaagcacgggctgtcctttaatggaaggctgttcggcgactgtttcgcccgctttttccgtttggttgttaataattacgatggccgcaaataaaacgacaacgattaacgtcagaatcaccgcaaatttcgcagacgattgtttctttttcactcagacacctcattgtttttaaaataaaaaagaagcggatgccggatggcccgcttctctattttaccaagacaaccttgtttaagaaaaccctgaaaaacgaattatctttgacaattattccgctttcactctcatgacgcgcatcgcgttggcaacggcgatcagcgtgacgcctacatctgaaaagaccgcttcccacatggtggcgaatccgaatgcgccaagcaggagaaaaatgatttttacgcctaaagcaaatccgatgttctgccagacgatcaggcgtgtacggcgtgcaatccggatggcttcggctgcttttgacggctggtctgtcatcaggacaacatcggccgcttcaacggcggcatcagagccgagagcccccatggcagctccgatgtcagctctggcaagcacaggcgtatcattaatcccatcgccgacaaacatcagtttttcattcggtgcaagcgccgcttcaagttcttcgacgcggtctaccttgtcacccggcaaaagctctgtgtacacgtcatcaataccgagctctcggccgacagcttctccggtctgctttgaatcacccgtcagcatcactgtccgcttcacgccgagcgcttttaaattggcaatggcctgtttggcgtcctctttgatttcatcggcgatcacgatcgcccccgcatactgctgatcaacggcgacatagacgacggttccgttgttttcagctgtgccggaagcgatttgttcttttgccatcagtttttgatttccggctaaaatcgttgatccgccggttttcacccgaatgccgtgtccgggtatttcttcatattcttcaatctcctcagccgagagcggttgattgtaagcttcacggatggaagaagcaatcggatgattggaatgggcttctgcaagcgcggccgcatgaagcaggctgtctttcgtaaatcccgccgccggtttgatatcagtaacggcgaaattgcctttcgttaaggttcccgttttatcaaacacggcgtatgccacctgattgagcgcttctaaatagttgcttcctttcacgagcacccctgctttagacgcagctccgataccgccgaaaaacccgagcggaatggagacgacgagtgcgcacggacaagaaatcacaaggaaaatcagcgcgcggtacacccagtcggatagcgcggctgaaggcacgagaagcggcggtaaaaaggcgagaagcaccgcaacaatgacaacaaccggtgtataatacttggcaaacttcgtaataaagttttccgttttcgctttgcgtccggccgcattttcgaccatatccaatatttttgacacggcagagtcttcatatcctttagaggtttcaatatgaagcacgccgttctgattcataaatccggccatcacatcttgccccggctccgcttttcttggcacggattcgcccgttaaagcggatgtatcaaccatcgaagaaccgctcagcacctttccgtccagcggaatccgttctccgggattcacgacgatgacctgtccgactttgacgtcctgcggcgaaacggcagtcatgccgttttccgttttcacattggcgtactcaggacggatgtccaataacgcgctgatcgattttctggatcggctgacggccgctccctgaaacaattcaccgatttggtagaacagcatgaccgcgacgccttccggatactgatgaatcataaatgcgccgatcgtggcaagcgccatcagaaaatgctcatcaaatacctggccgcggacaatgttttttcccgctctggctacgatatcgccgccaataatcaaatatgaagcaaaaaagagcagaaactcaaggacggcgctcgtgtgcgcgaagtaagcgatgacggccaaaacggctcccgcagccagcctcactaacatcagctgcagctttttgcggtactcatcctcgccgggtttgtcttcgtgcttcgaacgaacggtcacatgaggatcaatggactttacttttttcacaacctcatctttcatccattgttcgtttttgccgccggctgagaccgtgatggtgcttgccgcaaaattgacagcacagccgtctatgccgtcaatggcttttacgccgttttctattttttttgcacagttgctgcaatcaagtccgtctaatacaaattcacctttggctgctttcattttcgactcaccctactttccgtaataggattcccataacatcaatacagctaaacgaatttatatatatgaacatatactcatatatgtgttttctctattatatgcaggctttgaataaagtgtcaataaaaaagacaaaacaggcctcagcctattttgtctttttttaccctctgtaaacgcaaagcattaaggacgaccgatactgagctgaacgccatggcagcgcctgccacccacggggccagaaagccggacgccgcaatcggaatgccgatgctgttgtatcccaatgcccagcctaaattctgcttgatgtttctcatggtcagcctgctcatgccgatggcgtcggcaatgccgttcaggtcaccgcggatcagcgtaatatccgccgcttccattgcgatatctgtgccggtgccgatggccattccgatatcggccacagccagcgccggagcatcattgatgccgtcaccgaccatcgccacgcgccggccttctttttgcagccgggaaatttccgccgccttttgttcgggaagcacttcagcgatcacgctgccgatgcccgcggcttttgcaatggcttccgcggtctttttgttgtcaccggtcatcatgatgacgtcaagccccatatcattcaggcgtttcaccgcggccggagatgtttctttgattgtatcggcgactgcgataaggcccgccgctttgccgtttgccgcaataagcatcaccgtttttccttccgcctccaagcgggccatgtgcggaagcagcgcctcatgttcaatgtgttctgattccatcagccgtcttgatccggcaagaatcgttctgccgtcagcctcggcgtatattccggaaccgatccgggcttggaaccgggtgattttcgggatggcaatcccccgtttttcggctcctgacacgatggcttctccaagcgggtgctctgatcccgtttcggcggccgccgccagccgcaggagttcctcttcgctcattcccgctgccggtacggcatctgtcagaaccggtctgccgtttgtcaccgttcctgttttatccagtacgatggtcgtcagacgctgtgttttttctaaatgctctccgcctttaaagagaatgccgaattcagctgcacggccggagcccgccataatgctcgtcggagtggcgagcccgagtgcgcacggacaggcaatgacaagcacggcgatgaatttgccgatcgcttcagaaaactgtcccggcgccgcccatacataccaaatgagaaaagtcagcacggccagccccagcacaatcgggacgaaaatgcctgaaatgtgatctgcgagccgctgaatgggggcttttgatccttgggcttcttccacgattttaataatgtgtgcaagcgcggtatctttcccgacattcaccgctctgattttgagaaagccgtttgcattgatcgtcgccccggtgacggtgcttccgggagacttatcgacaggcatgctctcccccgtaatcatcgattcatcaattgcggaatggccttcaatcacttcgccatcgacaggaacacgttctcccggtttcacatatacgatatcccccgtccggacctcgtcaatcggaatcacctgtaccttcccttcccgctcaaccgccgccgtcttcgcctgaagcttcattaactttttaatcgcttctgatgagcggcctttcgctttcatctctaaaagctttccaagcaaaatcaaagtcagcaaaatggcgctcgtttcataataaagcccctctacatgtccgtctcgtccgagagacgcaatcgtcatgtacaggctgtatgcgtaagcggccgtcgttccgagcgcaacgagaacatccatattggcgcttttgtttctcatcgtcttgtacgctcccatataaaaaggccagccgatgacgagttgcaccggggtggcaagcgcgaattgcagccacggattcatcaggatatccggcatccagataaaagaagtaaaagaaaaatggctgaccatcgaccagagaagcggaaaggagagaacggcagaaaatatcagcctgatcagctgctttcgctgctctttctccttttgggataatccgccatctccatcaaccgcttgcttctcgtctaatctgtagccgagttttgccacggtctctttcagttctttcggtgtcacctctttggggttgtattcaacggagaccgtttcaagggcgaaattcaccggcgcgcccacaacgccctctgttttgttcaggcgcttttcaatccgattggcgcaagcggcgcacgtcatgccttcaatctgaaactcggctttttccgtcacaacatggtagccgagtttttcaattttatcctttatggcgccagcttcgattttgtcaggctgataggaaatatttgaggtctcaagcgcaagattgacggaagcgtcattgacgccgtccatccgtttcagccctttttcaattcttgaagcgcaggcggcgcatgtcatgcctcccacttgaatggtcatctctttcggttcactcaatgccctcacctcttctcacaaacccccagggggtatcattttcataaaagaaaaccgcgcccgtttccgcagcgcgataaatcctatacgacgtcataaccttgatcttcaatcgcgtcttttatatctgatacggagactttgttctcatcaaacgtcacatccacctgtccggcttccaatttcacctgaaccgccgtcactccgttcagttctcccactccggtctctactgctttgacgcagtgctgacaggacatgccttcgacttgcagtgttttttgttccatgataattccctccacgtcttgttttttcttcttcatgttaccatacccctgtagggtatttcaaaacattttattttacgattttgcgatttttttcacaacatcaagcagctcggcaatcgcctgctccccgtttccgctctcaatggcgccggctacgcagtgatgggcgtgatcttccagcagatgaaacgcgactttctgcatggccgcctgtacggctgaaatctgcacgagaatatccacgcagtatcgttcgttatccaccatattctgaatgcccctgacttggccttcaatccgtttaagccggttcaggatctggtctttttctttggcgcttttatgatttaacgattgatgctcggtatgtttgtccattttccacctcggtttttttcttcgttatcttcattatacagacttgaaaatccggtgtaaaaaattttcaacacacaagttttaccagtacacccgcggggtatataatgttatcacttatcaagagggggaaactcattgaaaacgatacaagttggcatattgggatatggtttgtcgggtaaagtttttcatgcgccgcttttggacgtccttgatgattatcagatcaaaaaagtcatgacgtccagaacggatgaggtcaaacgtgatctgccgggggctgaagccgtgcgcgcgattgaagacattaccggtgatcctgacattgatctcgtcatcgtcacgacaccgagcggaatgcattatgaatcagcgatgaaatgtctcctggcgggaaaacacaccgtcgtggaaaaaccgatgacggcgacttcagcagaagcggaggagctgagaagaacggctgaagataaaggcgtcttgctgagcgtgtaccataaccggcgctgggacaatgactttttaacaatacaaaagctgattcgggacggggcgcttcaagacattcatacatatcaagtcagctatgatctcggttcacatattattgaccagacacttctgcttttcggaatgccggaatccgtcaccgcacatgtgatgaaacagcgggacaacagtgaaaccgttgataattttctggccgcgctccattacggcaaacttcagttcattcttcaatccggctccatgaatgcggcaagcggcccgcgctatcagattcacggacggaatgcaagctttatcaaatacggaatggatggacaggaagatgcgctttcagcgggcaaaaagccgattgacgacagctggggcgccgatgatcctgacaacttcggagagctgacaatcgcagcggatgaaaaacggcatacagaaacaatcccctctgagaacggctcttaccttacgtactacaaactgctggcagacagcatcttaaacggaaaaccgcttcccgttacggcaaaagaaggcatcgatgtcatccgtgtcattgaagcggcgatgaaaagcagcgaacaaaaacggacgattgccctttaatatgaaaaacctcccagccgtacggcggggaggtttttttaagatcagaatgattttccggcttctttcgcgcgggcaatcgcatcttctttaatttgctgtgctttattcggttcagcattatggccttcaacgattaatccgtcaaaagaaggaacgccgaagaagttcatcatgatgccgatgtaacggtggcccatttccatgtcagccgccggtccttcagagtaatagcctccgcgcgcctgaatgtggagcgcttttttgtctgtcaacagaccgatcgggccttgctctgtatatttgaatgattttccggctacagccacagaatcaaggtacgctttcataacaggcgggaatgagaagttccaaagcggtgtgacgaatacgtatttgtcagctgccgcgaattgatcgctcagctcgttcagacggctgactttcgctttttcgttttcagaaagctcttcaaaacctgtgccggattgaagttttccccagccgctgaatacatccgcgtcgatatgaggaatgttctctttgtaaaggtcgatatgtacaacctcatcattcgggtttgattctttataagaatcgataaacgcttttcctgtcgccatgctgtaagatgtcttttcatcatgaggatgagcagtgatataaagtacttttgccattgtaaacagccctttcgttttcagattacacacacatttattatgaaatatgaatgtttttttatactgatcagttctgtaataattatagttacaaaaaaatcttttcgcaacaataatatctcgaaatcagtatatttttttgaaaagactgcaagaagtacctccagcaaatcgaaaaaaacccgcgttaagcaaatttcgacaaagaaaagaccgattttgaccatgttaagcctaaatcggctgtttcatttcagacagttgtgtggaatttatccatgcaaaatgttcctgctcttatattagagacaaacgaattccgcttcatacgttcgaatttatcacactcttttattgcaggtctgcttgccagtttaacaaatgtttcattttctgttctgtttcaccttcttggcggggttggtaaatggttaattttagttcaggggcatcgtacacttgaagagtaatatgatccataatcatttctccaactaaaggatgcagcagtgtttttttgccgcaaggagtacctagaacttcatgcttggaccaccaattacgaaactcagggctcttattggtaagttctttaataatatctttaaaccactcatcaccgacaaaacgtgtataggctaaacgaaattgagcaatcaagcgttgcgcatgatcttcccaattaagaaagaggtctcggtattctttagacgtaaagcaacgccagactgcattacgatctcgatcattcattttattaaagtcaccaaaaaccacggcagcagctttattccagcttactatgttcaatttttcgtcggttacatatgtagggcagtattctaattgactcaatacatttttcaggacgctatttacactttcaacgagaggtcttcccaccttagatagcaatggccgatttgctaataaaaatagatgctctttttcctcttcatttaacctgaatacacgcgaaatagcctccaatacgtctgaagatacctgtatatcacgcccttgctctaaccatgtataccaggttactcctattcctgccagctgagctgcttcttctcggcgcagtccttctgtttttctgcgcggaccaataggtaaaccaaagtcttgaggagataatcgcgcccgtcgtgtttttaagaaatcccctagttctttccttctttctttgtcacttaacatgaacttctccccttataagtagtagttttaataataggataaacacactcctattcccattataaaccttcatctattctaataaatgaaggaggtgagttttatggttttcaaaaatagggctgagcctttcccgaaaggattagttctcctcatggctgcagcatgtggttttacagtagctaatgtctatttaaatcaaacgctcttagtcagtatggcaaatacttttcacgtttctgaaaacaatataggaattgtagcaactttaactcaagtgggatatgcattgggaaatcttttattggtaccattaggtgacatttttgaacggagaaaattgatcctaagtttattatctattgtatgtataattttagccgcaactgctttatcaatgaatgtaacgtggctgattgcagcaaacttaattcttggatttgttaccatagtccctcaaattattgttcctcttgctgctaatttagcttcagaagagaacagaggaaaagtgttagggaatgttgccattggcttagtgtgtgggattttaggcgctcgatttatcagtggttttgcagattcccattttggatggagatcaatgtattgggcttcttttgctggcacaatgataatgatcattttaatggcaatgtatcttccaaaaagcaaaggaaatcatgcaatgcagtataaaacattacttgcatctttaggcccgttatttaaaaaagaaaaagtgttgcaaaaagcttgcctgagtcaaggaatgatgtttggttcctttagtgccttctggacaactcttatttttttattaaatacttctccgtattcttatgggagcaccgcggcaggtttaataggtttagtgggaatagctggagcctttgcaactcccatgataggccgggcgatcgataaaaaaggatcaaaatttgctaataccttatgtatgtttatttctttaatcgcttttctgaccttaatattcttaggatattggttaccgggattaattcttggcgcactattagtaacagttggcacgcaagcaaatcaagttgcttgtcaagctgctatctttcaactatctcctgaaaagagaagcagattaaatggtttatacatggtatctacattcttaggcggatctttaggatcatatctaggtgtacttgcttggagcaaatggcattggtatggagtatgtacagttgggatactcatgataggtattgcttttagttccttatttagcttacctaaaaaaagaacagtaaaaaatagagaattcgagaaaggaagtcatatctaatgtctgaaaatacagaaaactacaaaaagggattggaagttctatcaaaaatagatccgcacaactatcaaaatatcgtgaacagttttaaagattcagcagcacctgacttgggaactttggctgtggaatttaattacggtcaaattttttccagaccgggattagatttaaaatcccgccttcttgcagcagttgctggtctgactgctttaggaaatacggaacaattaaaattttatattaacggagctttaaatgtcggatggaccgaagaagaaattgtggaagctatgatgcaaatgttaatttatgcaggctttcctgtcgcattaaataccattttaacaatagctactgaagtattttctaaaagacgaaatcagctgtcagccaatttattggaaggagagtaaaaaatgattattgatagtcatgcccacgtagttctacctgtagaaaaacacattgaaatgatggattcaagcgggatagataaaactattttattctctacgcttgttcatccagaaaaaagtgaaagctacgatgaatttattcaggaaatggatgtactgaatcaaattttaaataacgagataaaccccctagaagcacgagtaaaagctctagaagaattaagggatgctatcgcaaaatatcctgaccgttttattggatttggatcagttccccttttaagttcctccggagaactgcgtgattgggttgagaagattgtaaaagattataaaatgaagggacttggagaattcacccttggttcaggccaaattaaaatgcttgagcctgtattccaggcagctggtgattataattcctttccgatttgggtgcatacattccatccactcaatttaaatgatattcaggaattgttcgctttaactcgtaaatatcccactgtccctgtaatctatggccatttgggagggattcattggcagcaagttattgcattaacaaaagaaacaaagaacgcctacctagatatttctgcattttatacaacctatgcattatctttggctataaaagaactcccagagaacactttatttagttctgattttccatatggtgatccattcctaaataagttggcagttgaacgccatgcttcaagtgaagaagtcgtacaacgagtactaggcggaaatattgctaacctcttaaagatttaacttatttttataacaatttcttagggaatataagtttgaaggattgcattcagcaggttttcattccttacgtcttttaaataataaagagccgatttactcttaacggttaacggggtaaatcggctcttttcttatccaaaatgctggcgggatccctttaatgacgggaatggcaagcagcagaaaaagcagaaacatttagtttctgctcaaaatcgggtttgatttacagaccggaatatccaacccgagattcccccgcagtgtatcggccggatagctttttcggtacagccccttttcctggaggattggtatgacatgatccacaaaggcttcaagcatgccggggatgtcagagtgaatgataaacccgtccgccgcttcccgctgaaaccatgtttcaattaatgacgctacacgttcaggtgtgccgataaaatgggttcgcggaaacgcggcttcgcgcgccacttgacgcagcgtaagattccgggctttcgcctctcttttgatacggtctgtcgtgctttgaaacgcgtttttcccgacgtcgcccaaatcaggaaacggctcatccagcggaaaacggctcagatcataatcgtcaaaaaatctggccacatatttaacagcgttctctatcggaatcagctcggcaaattcttggtatttcgcttccgcttcttcttgtgagccggctataatcggactgattcccggaaaaatccgcagcttggaagcgtcccggccgtaatccgccgcccgcttcttcacatcatcataaaaagccttcgtttcctcaagtgaattggagtgcgtaaagactgcatctgcattcctcgcggcaaacgaccggccggtttctgaagaccccgcttggaaaacgaccggctctccctgtttggaccggccgatattcagcgggccctccacttgaaaatactcgcctttgtgatacaggcgatgcagtttgtcagggtcaaaaaactgcccggtttctttgttgcggacgaaggcatcttcttcccaggaattccacagaccgcgcaccacgtccacatgttcctgggcgatggcatagcgccggctgtggtcgggaaggctttctttgctgtgattgcgcgcagctcccgcctgcggagaggtgacgagattccagcccgcccggccgccgctgatatggtcaagagacatcagctgtcttgcgatggtgaacggctcagtgaacgatgtggaaaatgtgccgattaaaccaagatgggttgtagaggcggcaagcgccgataagatagtgatcggctcaaaccgatttaagaaatgcgggatggacttttcagaaatgaacaagccgtccgcaataaaagcaaagctgaacagccctctttcagcagtctgcgctttttgcctgtaaaacgccgcattcgtgcttgctgtcggatcggcgtcgggatgacgccagccgtccgttgtgccgccgacaccgtgaatcatggctccgaattgaataagatctgtccggctcattttctctccccctttttcccctcgtaatcagcaagcgcccgttctacatgttcaatgccgacttgagtaacggcctgatacacacggctgtcaccgctgccgatttcaacgacgggaacatgacggatgccgtacttcgtctgcagcacgtcactcaattcgtcccgctctgtcacatcaattgtttcgtatgcaacggcattttcccgcaaatatcctttcacttcatcgcaataggagcagccctgtttgctccagaccactacgtttacttcatgactcatgttcatccctcctataattgcggggccggctgcaccgcttcgcttaacagccggtaagacaatcgtttttcctcagcgtttttgataggcgacaaaatcacaaaatcagtaatgctgtacggaacggataatcgtcgcagctcggcggcggcctcttcttttgtcccggcaatcacacccgtcttttgtgtaatcagcttatatggctgcgtgacttgttcaagaaacgcttccgcttgttcccgggaaccgacattcacctttttgccgtcttcgagaatgattttgaccgactcacgcgataccacgtgtttttccgcttctgcttttgtatgcgcggtaaagaccatcggcgcaaggtgaaattccgccttagaccctttcggcagatgctcgtcaaaggcgtggcgcgctttttctaacgcagcctcttcaccgtttatgaaataggcgaaaacgaaggaaatgccgagtttggccgcggatatcgcgctttccgcgctgccgccgagcaaaaagaggtcaggcgcatactcagtatgcggcgccggccgcaatgacgcgtagcggtgcgagtccggaaaatcatttcggatgaaatgagtcagctcctcaagcttttcttcaaataaacgggcgggctggataagctcccgctgcagcgcatcggttgacagctgaaatccgccgggcgctttgccgacaccaagcgccacacggccgggagcaagagcggacagaacccggaactgctctgccactttataaggactgtaatgctgcagcatcaccccgccggacgcgagacggatttttttcgtgcttgcggcaagataccccagaacaatttccggcgctgatcccgctatctcttcattgttatgatgctccgccgcccagaaacggtcatatccgtattgttcggcctcctgagccaatctcaccgtttgccgcaaggcttcttctgcggtttggttttccgcggtgacactttggtctaaaatgcttaaacgaatcatacgacaggctcctttatgcgctcttttatgtcataaccgtaatcaggcagcacgcggcggaggaacttcttcgttctttcttttttcgtcttgtaaaagacttcctcaggcgttccttgttccacgattgctccttcatccataaacacaatttggtcggacacttttctggcgaattccatttcatgtgtgacaatgatcatggtggcgccggtccgcacaatgttaagcatcacctcgagcacctcgccgacaagctccggatcaagggctgcggtcggttcatcaaacagcatcacatcaggatgaatggcaagcgccctggcaattccgacccgctgcttttggcctcccgacagctgattcggataggcgtgcaatttatcctgaagccccaccttggccagttcccgctcggcaatggcgtacgcatctggttttttcattttccttgcgaccgtcaggccttccataacattttgaatcgccgttttatgcgaaaacaaatgatattgctgaaaaaccatcgccgtctgtttcctcagtctgagaatgtcttttttggcaggctttttgcagttaatgacttcaccgtgcagcgaaatggcgccctcatccggccgctcaagtaaattaaggcagcgcagaaaagtggttttcccggaaccgctcgggccgatgatggtcacgacttctcctttccggacacttaaattgatcccctttagcacgtgatgactgccaaaatgtttctgaatgtttcggatttcgatcataatgcgcctccttgatatctggccgcccttttttccgccagactgtttacagcttcgagaatcagcgttaatccccaataaatcacggcagccccgataaatgcttccagaaatgcatagttatcggatgccgcaatcgtcgccgttcctgtaatttcaggcaccgcaacaattgccgcgatggaagtggtatgcaaaaagccgatgcctatgttggtgaagttcggcagcgatatcatgaacgcctgcggcagaaccacgcgccgaatcatctggccccgcgtcaagcctattgaatatgccgcctccgcctgccccgtatcgacggccatgatcccggatcggagaatttccgtcatataagcgcctgccgttaatgacagtgccatgatgacaaacacggcgaccggaatctgattggccgaccagccgagatgaaacgcgcggctgaattgatcggcaatcagcggaacccctaaataaatcagcataatatggagaatcgccggggtgctgcggaaaaaagacacgtaaaacgctgagcaggccagcagccatttgatgcggaatatacgcaccgtgatattgccgagagctatgaaaaatccggcaataatcggaatgaccgtcatcgccaatgtaagcggaacggttttcatcatttgtttgatcgcagtgccgataaatggaatgtccagctccactgttctccctccttttcagccgtgcgcgctcatgtcaaaaaccgtcacaaggcgcgtctcatctttcttgattcgtttttcggcccatctgaagacacattcaaataaaagggcggccgcataatacagaacagaaagcgagatatacacttctaaagaatgattgctcgatgtaatcaaggtctgtcctctgcccgacatatccatcaccccgatcgaaaaagcgagtgatgtatcttttaagaaaccgatcaccatatttccgatgttgggaaaggcctgcacaagcgcctgcggcagaatgatgcgccggaatgtctgccccccgttcagcccgatgctgaaagccgcctccgcctgcccgcggtcgacgctgttcacacctcccctgatgatttcggccgctcttgccgcgctgctcagcgcgtacgtggcgatggccgcatacaaagggtccattttggaggtatcaatcccggcgagcgccgtgagcgccggaataccgtaaaatacaatgaacagctgcaccatgatgggcgttcctctgaaaaaagagatatacagcttcgcaaactgattcaaaacgggaatacgatagatgcggagcagcgccaaaagcagccccaatagaaagccgaacagcaaagacaccgccaatatatacagcgtgacgggcaaatacccgagcaatgtcggcacaaaggacgcgatcatactgatatcaaacgctttttccattgccgatccctctctttttcacttaatattgctcctttgaataatcagcgccgagccacttttcactcagctttttaagcgtgccgtcatcaatgatttcctgcagggctttatcaatgtcatcgctcagcgtttgttcatttttgttaaacataaagaacactttggcatttgacagcaccccgccgaccgttttttctttgatcgcgctcgttttgttttggaaatcgacggcaaacggcgtagaaatcgtcgcatcggcgcggccggatttcagctgatttgccgcatcgttggagccttggccggcataagcgatttcaaacggactgccgtgttttttattccattttttcagcacaagcgcgccgtttgacgtcggacttgtaatgacccgctttcctttcaagtcatcaatgccgtgaatgttcccgttttcttgaagcaccgtgattttcagcgggaagttgttatacgcgacttgattgaacagaaattttttctcccgttcggcgcttttctccatttgatgggctacgatatcgactttatgctggccgaggctgacaagcaggttggagaaatccatcgttttaaaagtgaaacgatagtccggcaggcgcctgtcaagctctttcaccagctcaacgtcgtagcccgtcaatttgcctttatcatcaataaagcaaatattcggaaattgagttcccgtgccgaccgtgatgttcttcacgtttttctgattgcctgatgccgcctccccgcccgcgccgcaggctgataacgccgccgttgcggcaattgttaatgacatgaccgccaatcttattttcatgtgatcgccccgttttctgcttcaattatttcgtgaaacttgattttgaataatccgcgccgagccatttttcactcagtcttttcaatgtgccgtccttctcaagcttttgaatcgcccgatccgtatcgtcggccagggtttggctgtttttattgaacataaaatacacctcggtatccagcagcacatcaccgaccgttttttgtttgaacgcgtgcgtcttattttgaaaatcgacggcaaacggcgtggatacggtggcgtcagcgcgtcctgtctccatttggtttgctgtatcactgctgccctgcccggcgtatttcaaatgtatcgggctgccgtgggttttgttgtatgccgtcatataatccgccgcgtttgacgtcgcgccgacgatgacggttttcccttttaaatcccggagcgtgtgtatcgcgtcattatccgccttcaccgtgatgtacatcggcgagtagttatacgggattttgtgatacaaaaagcgtttctcccgttccttatttttcgccatattgtgcgcgatcacgtcaattttccggtttccgagacttgtaagcagattcgaaaaatccatcgtcttaaagacaaatttgtattgcggcagctgtttatcaatggctttcatcacttcaatgtcatagccggtcagctcgcctttttcatccataaaagcaatgttcggaaaatcagttcccgtgccgacaatgacggtctgcacgccgctccccgcttttgtgctttctccttgcccgcacccggccagcacgccgagcagcagaagcagacagccggctctgatccgtttttttatcattgcgcccagctcggtgtgcctaacagcgacgcgtcaaaccgctccggtatgagcacctttctcatcatgactccgatgtctccgtctttctcctgctcaaaatacacttcataccccctccgtctgtacatatctacaagccagggatgcttgcgcgccgaagtgccgagcgtgatggccggggccttcagcgtatcccgcagcacgtgttcctccacataagtcaaaagtttgctgccgatgccctgccccttcagctcaggaagcgtcgcaaaccaccagacgaacggatattttgacggaggcgtttcactctcccacggaaaacggatcgtaattgttgaaagaagccgtccgtcccgttcaagcacgacggctgaatgattttcaatattttctgttaccatatcgatgtcggcccgcgccgacggccagtcaatctccaaattgcggatcggctgaaacgcgctgtacagcagctctaaaaactccggcgcatcctttttctcagccaatcgaaatatgtcttcactcattccggtcactctccccgcaaaaatatataattccaatttgtttactaagctttgattgtttatactataaagcaaactaatttatttgactaatcaaaaaaagtaaaggaaaggttcaagaaaattaatgaacagccgggaggggatttcgttggaattacgcaccattaaaacgttccatacgatcgtacagtcaggcagcttttataaagccgccgaaattctgaactactcacagccgacgatttcaatgcggattaaacagctggaacaggatgtaggcgcgcagctgtttgaacggggaaagaagctgaagctgacaagggcggggcggctgtttcatgagcgggccgggcagcttctcgcgcaatacgaggtgcttgaccatactctggccgacatcagacaggggcaggccggccttattcacatcggcatatccgaaccgacggcaagcctgatcttccctgccgtactgcgggggtttttagatgattatcctgacatgtcggtcaatgtcagcgtggatgatgccaatacatgcagccgcaaactgctggagggcgccattgattttgccgtatgcggcgagccggagctgattctggaaaattatttcgatccgtttttccatgactcgctcaatgtcatcgtgtcagacagacatccccttgccgccaaagcaagcgtcaatctcgaggatttagaaaatgaatgcctgattttcacgcccgccaattgcccgatccggattcaaattgaacagcacctgcagcggtccatcggcagccgctatcgaaaaatggagctgaccagcagcatggctcaccaatactatgtcagggaaaatatcggcgtctcaatctttacggcgacggcgcactcagaaccgatcgagggcacgaaggtcattccgatccgtaacttaacaatttcaccgccggtcgggctgttgacaaaccagaaagaagagcattttgactctgctacaaaagatttaatcagcaggatcatcggccggtttcagcgtgatccgcattaaaaaaacccccgctttacgggggtttttgtacgttcatcttatataatgctccgcaccaagccgccgtcgatccgcaatgcagatccgttaatggcagacgacagcgggctgcttaaaaaggcgacaaagtgggcgatttcttccggacggatcaatcgctgaatgatcgacgtcggacgattttccttcataaatcgtctctccgcctccgccgcggtcaggttttcacccggataaagcgactcgagcattgtttcgacgccctctgttttcgtggagccgggcatgaccgtattcaccgtcacattcgtcccttccgtgagttcggccaggctgcgtgacagcgacagctgcgttgttttcgtagcgctgtaatgggccatttcctgagaaggcatgacggccgcttcactcgagataaaaatcacccgcccttccttccgttcaatcatccgctttgcataccggcgtgtcagcctcacgccgctcatgatattcacctcgaaaaaccggagccactcttcgtcaggaatatcaaagtattccgcaggttcaaagattcctaaattgttgacgagaatatccacatccggatactgctgaaaaatcgcgccgcatccttccgccgtgcctaaatcaaatgcggccggatagagacgggcatccggcgtctgtttctctagttcccggatcgtttcgttcaccttttcttcacggcggccgttaatgatcacggccgcaccttctgcaatcagcgaagccgcaatcgccttcccgatgcctgacgtagatcccgtcacaagcgccgtctttcctttcaactgcaaatccatcatccattcctccctatcgcaagtctcttcttatatatggacagaaatcgaaagcctgaaaccttccgtccctattatcggatagaaaaatagatgaggggaagtacgcactttttagtgcctgtccgttgtcccggctgacggctgatcgatttgaatgaaaaattcaccatctaattctgcctgagccttttttaatatccttaatacatcatcagcatccgaacccaattccttctgactgatctcaaaattcttccacaccaaagtcagcggaagttcgatccagcctgtcagacaatcccataaggcattcagattttcaccataaaagtccgggaaatctaattgatcttttaagattcggtgtaaagcttctgtgcttgtaacatcttttccgtctatgatgacgatttccatttacattcactccttgatttttgggcatgaaaaaaaccgcagtgcggtcaagtgacggcactgcggttcctctgttatgtatggagacggtgggagtcgaacccacgtccagaaacatcgattacttaagcgtctacgagcgtagcctgcatatttcgtgtttcactcgtcttcgtgcctgcgggcgggccttccgagagctagtctgtcagtctcttcttacgttctcagacgggaacgcaagcgtagcctacttggatgtgctcttcacggacacataggcaatgtcaggaagagctcgctgcgtttattaggcagctagtgctaagttttggttaaaacttttagttttgccagttatatttaggtgcgtgttaacgagatcgcctctcggctcgcagctcaagctcgatccatccctgtcgaatccgtaacgtccccttgttaagggtatacgggagatctatcaagctcttgctcaactggctgtactgttattatatcatgatcacagacaaattcaattgggaatgtcttcaataaacagcctgtgaatctgatgtgtgaacagtatagcatacggcagttatcacatcaaggctcatacatcagaagcctttttgtctgtctctgaacgctctttcgatttctcttttggcgtcttttcgttttaaatcttcgcgtttatcgtatgttttcttcccttttccgaggccgattaacactttggcgaaaccgtttttcaagtacagcttcagcggcacgagggaatagcctttctctttcgtcaggccgatcagcttattgatttctttcctgtgcatcaaaagctttctcgtccggagcgggtcgtggttatagcggtttccctgctcgtacgggctgatgtgcatgttgtggaggaacacttcgccgcgctcgattttcgcaaaggaatccttcatgtttacgcggccggcgcggatggacttaatctctgttccctgcagcacgatgcctgtttcataggtttcttctataaagtaatcatggtttgcttttttgttttgcgatagtactttgcctgatccttttggcatgccttatcctcctctctccgcaaaaaccgttcatgtgtgcgatacgctttattttagcaaatggagcgttccgcgacaatgaaaatgcggcttgcgaaagaaagcaaacagagcattttgccccatttgcttttcgcatttacttcttctttttgcgtttttgtttcggcgcgttttggaaaccgcgttttttctttttcttcttcggttttgtaaaccattcccctttttcctccgatttcggcggtgaagccggggtattgctgtttaacacgcgtttccgcgccggtctgccgcgttttctgcggtcgcctgtcgtttctctcggacggcgggtgcctttcatgccgacaatttcaaagtcgatgtttctctcatctttattgacgtcgacgactttgaccgtgatttcatctccgatccggtaaacgttgcccgtgcgttcgccgatcatggcgaaatgctgctcgtcaaaacggtaataatcatccgtcataaagctgacgtgcacaagaccttcaatcgtattcggcagctcgacaaacattccgaaattcgtgacggaactgatcatgccgtcaaattcctcgccgattttatcaagcatatattccgcttttttcagatcgtccgtttcccgctctgcatcaacggcgcgccgttccatcgttgacgtatggtcagcgatttccggaaggcgttcggcccacttttcttgagtcgcttcgtccgattgtccgttgatcaaatacgttctgatcagcctgtgaacgattaagtcaggatagcggcggatcggcgatgtgaagtgcgtataaaattcagtcgccagcccgaaatggcccaagctgtgcgggtcgtatttcgcctgcttcatggaacggagcatgacggttgaaatcaccgtttcttccggacggtcccgcacttcatcaagaatgctttgcagcgcgcgcggatgaatgtctccggcttttcctttaacgatataaccgaatgtcgtgacgaactccaagaacttttgcagtttttcggcgttcggctcttcgtgaatccggtaaataaacggcacgttcatccaatggaagtgctcggccaccgtttcgtttgcgacaagcatgaattcttcaatcagcttttccgctactgagcgctctctgatgacgacgtcttttacggcgccttcctcatcgacgagcactttcgcctctttgaaatcaaaatccacggcgccgcggtccatccgtttcgcccggagaatttccgccagacgttccatgtctttaaacatcgggacgagcggctcatatctttctttcagctcggcgtcgtcttctgtgagtatctggttgacatctgaataggtcattctttccgtcgttttaatgacgctttggaagatctcgtgctctgtcacctggccctgctggttgattgtcatttcgcaggaaagcgtcagccggtcgaccttcggatttaaagaacagattccgttagacagtctgtgcggaatcatcggaatgacccggtcaaccaagtacacgcttgtccctctttccagcgcttctttgtcaatcggggaattctccgtgacgtaatggctgacgtcggcaatatggacgccgagcttgtagctgccgttatcaagctttgtcacggtgacggcgtcatccagatccttcgcatccgcgccgtcaatggtgacaatgacctgatcgcggagatcacggcggtctttaatgtctttttcatcgatggtatcgggcgtgcttgttgcctgctccatcacgtcagccggaaaatctcccggcaggccgtgcttatggataattgataaaatatcgatgcccggatcatttttatggccgagtatttcaacgatttctccttcggcgttcattctgccttcagggtagcttgtcagtttgacgacgactttatggccttccgcagcgccgttattggcatgtttcggaataaaaatatcactcgtgattttcttatcatccgggatgacaaagccgaagcttttcgtttctgtgtatgtgcccacgacgcggtcgatgcttctttccaagatgcggatgaccgtgccttcctgtctcgatccgcttgactgggaattgagccgcaccatgacgatatcgccgttcatggccgtattcagctcattcggcggaataaacacgtcgcttaaagaggtatcctccggcaatagaaacgcgaatccctttgcatgcgcggaaatttttccttttactaaattcattttttccggaagcccgtagcggttgcttctggtgcggacgatctgtcccgtctcctcgagcgccaccagcgcttttaccagctctttaaattcatctgcttccgtgatgttcagcatctcctcaagttcctgaacggtaaggggcttgtacgcctcttccttcataaacgcgagaagacggtccataaacgcttctttttccattattcgacctcctgtttgttaccaatcgagtttctctaaaaattcgtacacatcctgatgaacgaggtcccgttctttatcgagcgtaatgacatgacctgattcttcataccatttcagctgtttgtcgtccgtttccacctcgttgtaaatgatgttcgcactttctgtattaatcatatggtcatgccgtgcctgaaccacaaatgtcggggaatagatcatgtcgacgtttttgcgcacatcggcaatcagctcctgaagcgatttgagcgtattcatcggtgttttttcaaactccttcatttccttttcaatctgctccggctgttttccttcgaattttttataattgcgcgcgtaggagagaactccttcgtacataacctcttcacttttaatgtgcatcggcgcacacataggaacaattccctttatgggtacagtgtaacccaatttcaatgaaaaaaccccgccaagcgacagtccgcaggccgcaatgttttcatagccttcagaccgtaaatattcataaccgtccatgacgtctttccaccaatcttcaggccctgtatgtaccagctcttccggcggaacgccgtgccctttatattgaggcgcgtgacaagtgtagccgcgctcattcaagtagcggccgagcattctgacgtctgccgtatttcccgtaaatccgtgcagcagaagcaccgctttgtctccgcctttaaatgtaaatggttttggtgtcacaattttcatgctcataaccccttttttgcacattcaatttagttttccacagttttgcgagaaacaaacgccgtctctcaacaagaaaaaggcctgatattaaatcagaccttatacaaacattgccttatacgatatacgccagcgaaatcgtcaacacgaaaaacaagactgccagcacaacggttgtgcggtgaagaatcagatcaaggccccttgctttctgttttccgaaaagctgctccgccccgcctgaaattgcacccgataaaccggcgcttttgctggtttgaagcaatacgacaataataagtgcaatactgacgatgaccaataaggtaatcaataatgtgtgcatcccatacacctccagactgactggcctacattgcttctattttacatgaaaaacaaaggcatgtcacgccgtatcggtgcacatcatgtcagaaaaacggaaatgcgtttgaaacttccatcatcattgacttttgtcaacaaagtcgtagtaaaaaagatcttcaaatttcatgtcaaagtaatagagcatttttccgatgaccagctggcccggcctccgctctccattcagtacacggctcagtgtggcgggagatattccgatctccagggcgagctggtttaacgagtagtcattattgaccatatactgcagcacataatctcttctgatctgtatcttttcgaccactttcttcaccttccgttctgtcaaatactttctttcttatacataagatacggcttttgttaacttttgtcaatacttttccagcctggctattccctttagtcaataaacatactagaatataaatagaccgcgggagggggagagactgtggaaagcttcgggaaacaattgcggacattgcgggaaaaaaggcatctgacagtgaaccagctggcaacgtattcaggcgtcagcgccgcgggaatctcgcggattgaaaacggcaaacgcggggtgccgaaacctgcaaccattaaaaagctcgcagatgcgttaaaaatcccgtatgaggaactgatgcagacggcgggatacatagagaccgttcaggaaacgagagccccgtacgacacgggctgcaccttgctggaaaaagccgaaacgtatgagctgcatgatttatccctattggagcgggagaactggcggcacctgtcgaaagaagacttggttctgcttgataaatactttgcgttcttatcggctgaagccaaaaaaagaacaaatgaagactcatgactttgcacatgtgaggcgatcttattgaacacattcggaaagcaattaagagagctgcgccgcgcccggaagcttaccgtcaatcagcttgccgtctattccggcgtcagttcggcgaccatttccagaattgaaaacgggcaccgcggcattcctaaacccgcgaccatccgaaaattggcggacacattaaaaattccgtacgaggagttaatggcgcgggccggacacatcaaggcatttcaggaagaaatccgcgaaacctccgaaagctatcaatccatctgcgccatctatcagaccgccgttgacagaggcgcggagcatctgccgctgtttgacagcaaaaagtggcagcatttcacaaaagaagatattgaaagcgtcagcaaatactttgattttatcgcggctgaagcgaaaaagcgctccccggattcctcatcctctttttgatcctctcctcaacttaacaagcgccagacgtacgttccctccgattttgcggtataatagcagaagacgaggtgaaaaagcatgaaccaatcagaaatgtgccccagattcgaaaaagcggtcgacatcctaagtaaacgctgggtggctctaatcgtctttcagttattgaacggacagcagcgatttagcgaaattgaagcggcgcttccgaatttaagcggaagagtcttgtcagaacgtctgaaagaacttgaaacagaaggtgtcatcaaacgggatgttatccccgaaacgcctgtccgcattgagtattctttaacggaaaaaggctgcgcattagcccctattttagaggaaatttccaagtggtcttcaacatggattgatccttcctgataaactcttttccgcataagcggctgatctttcaaacggacagccgtttttatttttgcttttcttaaacagaaaaacaagccctcaggcgtgcagggcttgtttttgtctgacgccttccagcggaattcgaatctccgcccgggctcctccagactcctgattttcaagtattaattcgccgtggtgaagatgtacgacatgatgggcgaatgtaagccccatgccgtgatgccccgccgaatgtctgcttttatcctccgtgtaaaaaagctgtgtcgctcttttcagcgcttccggcgagaacccgcttccgctgtcggatacggcgagatggagggcggaatcgttgcacaggacgtccacacggatttcccctccttccggcgtatagtcgacggcatttgccgcgatattcatgaccgccctgtggagcagctcatgatcgatcggcgcttcttttctgtcaattccccgttcgctgagaacgagatcaatctgcttcggccccgcaagcgccgccgcgtcacgatatatgttttgaatccactctttgaggtcggtatattccacatgaacggcaactgcctcctccgctttagaaagctggatcagctgtccgacataatgctcgattttgtttccggcatccagaatatactgcgcatattccgcctgctcctcatcaggctctgttaactgaagcagctcggcatttcctttaatgatcgttgccggaattttaatatcatgcgcaagcgcgccgatttgttctttcttaatccgctccgcctcccattgcgccgccagagatgcctgaagcgcgtctttcattttcagcagagagtcaatgacatcgtcaaattcttttatacgcgacctttttggattgatatttaaattctgtttttgaatgcttgccgtaatggagctgagtgtgctgaaatgccgtctcagctgattggcgaaacgcgtcgtcacaataaaaacggtcaaaagaagcaaagtgatcagaattgtaagacccgtccattcataattcggcagatagcgccttaacagcggcgactgaaattccgacctgagtgaatattggagaacgccgtattcatctttccgatttatcaccatgaatcctttttgagcataattaaaatacggctgatgctgaatcttttttctggcgttggctgcatcttgttccgtcatcgttccttttgtcatccgctttgtttttttatcaaaaacggcgtatgtcatacctgcggggatcatgtcttctgttatcttttccgctgatttcaggcggggtttgatctgttccgcctcatgctcgctgtagtttgcgggcaggatcgctccggcattcatagcaatggcatttaaggcgacacataatgccgccacccccatcgtgctcagacacagtgtgatcgtaaatttgacaagctctttgcggatgctggattttccttttgctattcccatttgtatccgacaccccacaccgttttgatcggatcagccccgtgttctttacattttttccggatggttctgataaactccgtaatggttgaatagagcgcatcgccgtccaagccgtacacttcctcgtaaatctgctcccgtgagaatgttctgtttttatgctgtgccagacattcaacgattttatattcgtttttcgtaagaggcagtttccggtcatcaatccatacttctttattgtcaaaatcaaacatgaagcctgatatcagccgtttcgtctgatgcttttcccgccgttcccttctgacatgcgcgtttacccttgccatcaattcctgtacgccgaacggctttgtgatgtaatcatcagcgcctgtcatgaggcctttcacaatggattcttcgtcagactttgccgttaaaaacaggatcgggctgtccaccagcggccgaatcctccggcagagttcaatcccgtcggttccgggcatcatgacatcaagaagaatcaaatcatagccttgaaaaaaatccaatgactgatcctccgctttttccagaatcgttactgtatgctgatcacgctgtaaaatgtttctgatcagaacgagaatatctttttcatcatcaattgctaaaatgtttgccaccggccgaatcgctccttgcctttattcatatgaacgccgcccttcccatcttctgcaccaatagaggccggccagacataatatcactatagaaaaatataacattatttctccgaatctcatatcgtatcttacataagggaggaactcttttttgactttgtcaaaatgcagcagtcctgcaaggcctgaaagccgtacgctccatgcccacgggaaaaaacgccagatggtatcgccaagtcccgtattcatgagcgccgccattaataatcccgcaccccctaaaagcccggacggtcccatgccgtactttatgccgacaaaaaaagacatcatataaagcggtatactgccggcaatcagccacgcccctccttttaaaaagagaagatacgggagatcattgatgtgaagaacaaatttcatccccgccaaataaagacagacggcgagacctgccgataacacattcaatagaagcagcagaagcagcttgcccgcaaaactgatgattttagaatgcggaaccgccagcatcatctgaaaatggcccgcctgttcctcaatcgaggcagacatgccgcagacaatactgatgatgaaagggtataaaacggcaatcgcgctgaaaaacacactgtacagcatataaggctcctgaacccttccatacatatacaacaggaaaaatcccgcgcataaaaccggcgccgcagcatgcatccatatgagcggcgtacgcttcatttttaatacatcggcccacatatatcgtaaaagcacggtcatgaccggtttcccccttttgaaaaagacacggcggaaacaaaacttattgcgataaaagaaagaatagaaagaataatagccggaatgatcacgtttccgtttaataagccgctgtttgcgggaagcggaattccgttcggatggatcccgagaatcggtgacatcagccggactgaccagctccatggactcagccaccacaatgagcctgacgccggcacaatgcctaaaacaaaggcggcgatcatattcacgagaatgactgccgtaaacccgaactgtctggcaatccataagcagaacggaatttcccaaagcgtagacagccacaaaagggaacttgcttcaatacctttcagctgaaccgcagcaattgccggaaacacaaggccaagaaaaaacatgatgactaaaaagacgatttgcgacaggagtgaatacagcgcgatcaagcttatttttgagaaccatatgctcttcaagtcagccggcagtgagtacaccgcgcggtcattcgctgattttttctcttttttaacagataaaccgcacattagagcaatcatgagcggcatgaaaataaccgcccaccaattgaacgtgcccgtcataaaataagccgtattcagcagaaaagaaaaagccgtgtttagaagcggaatcagaatgatcagctttctgataaatgttcttttagatgtaaggtgttccgcctgcatgtactgaatcatttcccagtccccgctttctcccgtgtcgatttgacaacctccagaaacagccgctccagatcgtcttcccggctgatttctccctgatatcctaaaacgccgtcactgatgattccgatatggtctgcgatctgctcgacttctgataacaggtggcttgataaaataaccgttattccctgtccgggcagggagcggataaattcccgcaaatcctgaattcccatcgggtccaatccgtttgtcggctcatcaagaattaaaagcgacggacggtttaataatgctaacgcaatgccgagacgctgtttcatccccatggaaaattgtccggcacgcttttttccggttcccgttaatcccgtgatttccaacacttccgcaatccttgaatcaggcagtccgagcatcacgcagcggactttcagattttcagcggctgtcaggttgctgtaaagcggcggcgcttcaatcagggaaccgatgcttttcaaatcttcgcgcttccatgtatgtccgtcgaacagaacttcgccggatgtttgctgcagcatgccggtcaatattttaagtgtcgttgattttcccgcgccgttcggaccgagcaggccgtaaatactgtttcgcttaaccgatagagacacatcagccactgcctgttgtctgccgaatgatttttgcagctgtctcgtttctaagatgttgctcatatgattacccctctgctttgttatttgataagtaagactttacagcgcagttatcaaaatttaatcaagaaatcaaaaaaagcatccttcacgcggaagaatgctttttttcatgaggctgagcgtacgatcagctttcttttttgttttttcaccgggctgagggctcgttccagccacgccatcagcaggtctgcggctaccgccatcagcgcggtcgggatggcgcccgccaaaataatggcggttccgtttgtcgcgttcgaccctctgacgatcatatccccgaggccgcccgcgccgacgaaagttccgatcgctgtgatgccgatggcaatgacgagcgccgttcggagacccgccataatgacggaaagcgcaagcggcagctccaccatacgaaggatttggtatttcgtcatgcccatcgcttttcccgactcgagataagcgtgctcgatattgataatgcccgtgtgcgtatttctgagaatcggcagcagtgaatacaaaaacaaagccgtgatgaccgtattggcgccgagtcccatgacgagcatcaggacggcgagcatcgcaagcgccggaacggtttgaatcacgttcgccgcagcaaacacccagccggcgagacgcccgtgccttgctgtcacaattccggccggaatggcgaaaatggcggcgaaaacgacgccgtacgccgacatgagaaagtgccgccagcactcatacagaacataactgccgttttgagcataatacgtaaacagctccttcatcgtgtccatccgcacatctcctttccgttattcaaagtaatgatgtttttctaaatattccttggccacgacggacggctcttttaatcggccgtcaacttcgtaattcattttctgcatcatctttgtatcaatcgcgccgatcattttattgatcacgccctccagttcgggatgctcttttaatacttgatccggaacgacgggtgaacagtcatacggaggaaagaaccgcttatcatccttcagcgttttcagtccgtaagcgatgattcttccgtcggtggaataagcgagcgcgatatccatctttctgcttttcagcgcgtcgtaaacaaggccgatctgcatcggatacgtgccttcaaatgacattccgtatgtgttcataaaatcctgatatccgttgcctctcagcttcatccagtagttatcgacgccgaatttcagatgagacgcttcttttttgacatcggataccgattctaaatggtacttgcgggcaagctgtccggaaacggtaaagacgtatgtattatcaaagccgtaagaatcaaaccatttcatgtcatatctgttttgaaattcacgctgaacgagccgcagcgctttgtccgggtctttttccggctccatgcgaagcgtcccggtcagcgcgtctcctgtatagcgcgtcgcggcgatatcaatatcaccgtttatcaaggattgctgctgtacggcgttggagccgagatttttaataaccgttgtcttcaacccgctgtgatgttcgatcatctgtccgagcatgctcgcgatgatttctgattcggtcatgctttgcgcgccgattttgatggtatcctccgatgcggcgctcaatcccgggagcgagcatccgccaaggagcagcatgccgatacaggcgattgcgagcagccgttttttgcatctattccccatgagagacctcctccttatgaagcatcctttatgcttttcagcccgtcaggcgtgactttccgttctgtcatccccagcatgtaatcgacggctgccgcaagcactgtgaccggaacggcgcctgcgataatatactccggctgataaaggtttaagccgataaaaatgtaatctcccagcccgcctccgccgataaaggaggcgagcgtcgcccagccgattaaataaatcgaagacgtcctgatgcccgccatgatgaccggagcggcaagcgggagttctacaaacctgatctgctcccatgccgtcatgccgattccttttcccgattccagaagatgccgattgacgccgagaatccccgtatacgtgtttctgagaatcggcagcatggaatagaaaaacagcgccgcaacggccgggatctttcctacgcctaaaagcggaataaaaaacgcaagaatggcaaggctcggcaaggtttgaatgatgttgacgatgccgatgacggcgccggctcctcttttcatcctcgtcagcacgacgccgagcggaacggcggcgagaatgcccgccatgacggcgattaatgagatgtacagatgctcccatgttttataaagcatctctcctccatttgcctgtaaaaattgcacggtctgattcatatcaattgaagcctcctcatgacatcaccgcgagctgattctcttctccccagatggagtcatagacgatgtcaacgaggcttgcccttgtcacgattcccgttagccggccggcttcatcaaggaccggcacaaatttcatgcctctttttaaaattttatggacggcgtcgcggagcagagtgccgcttctgaccgtgtacagatcccggtcaagcacttccgcgacggttaccgcttgtcttcgtttgcggtcaatcatctccacatcgacataaccttggagaacgttcttttcatcaatgacgagcagcgaatccacccgctcggcacgcatcagctgaatggcggctgacagtgttttctcaggtgttaccgtcacgggatcgggattcatgatctgctccacccgttcaatatcagggctggatgattggatcagccgttccttgccgataaactcctcaacaaattcattcgccggaaatctgagaatctcatcaggcgttccggcctggacgatttctcccgctttcagaatgacgattctgtccgcaagcttgatggcttcgtccatatcatgggtaacaaatacgatggttttatgtaaggttttttgcagttttttaaattcttcctgaagggaatctctcgtaatcgggtcaagcgccccgaacggttcatccattaagatgagcggcggctctgcggcaagtgcccgtaatacacctattcgctgctgctgtcctccgctcagttcatgagggtaacggtctaaatattcaggccccatatcaacgagctttaaaagctcccgcgcccgttccttccgtttttcggcaggatgctttaaaagcttcggaacgagcgtaatgttctgctgaatggtcatatgcggaaacagcccgatctgctggatgacatagccgatgcttcttctgagttccaccgggtcttgttccataatgtttcggccttctatcaggattctgccttctgtcggttcaattaagcggttgatcattttcatcgtcgtcgttttgccgcagccgctcggcccgataaaacaaataaattcgcctttggcgatattcaggttgatgctgttgacggcttttttcccgcctttatacattttcgagacattttctaatgtcagcaaacactcacacctccacgattaagtttattcaattcgttaaattcaaatttaacttttcagacaattgaacgttttccattataaattaaactttgtaaattaaaaagtttacaatttgtccatattatatataaaggttgtgtaagcactgattaacccgtattgaccggcaaagttcttcttattgctccggattactgccaaattctctcggaagagcatttccgccggtttaaaaatgtggtatattgacatcggaattgctgactgaaaggattgaaactgttggagaaagatccgttacacgtaatcgaacaagctgaagatcatttgatagaacgaatcgctgaaaatatgcatacattcggaatgcccgcgacggtggggcgcattttaggcattatttatatgaaccgcaagccgatgaccttaactgaattatcagaagcgaccggcatgagcaagacgagaatgagtcaggcggtccgtgaaatgcttgacgtcaatctggcggaaaaagtgtttgaaaaaggcgtccgcaaagatttatacgacgtcgagcaggattattaccaaacctttattacgctgtttacggccacatggagcaaggtcgtcagcaaaaataaaatgatgcataaaaagctgaaccgcgaactgacagccgtccttgaaaacggcgtaccggaagaagctgaggaaaaaatcaacgaactgctgaaagaattaaaggattggcttgattactacaactggatcagccgcctgatcgaattttttgaaagcgaagaaattttcaagcatgttccgaagccataagaaaaaaacgccctgacccgcaaggcgttttttttcatgccgcattcggcgctttggttcgttttttctttctcaccggactcagcgcccgctccagccacgccatcacaagatctgcgataacggccatcagcgctgtcggaatggcgccggccaaaataatcgcggttccgttcgtggcgtttgagcccctgacaatgatgtcaccgagcccgcccgcgccgacaaacgtaccgattgccgtaatgccgatcgcgatgacgagcgccgtccgcagccccgccatgatgacggaaagcgcaagcggcagctccaccatgcggagcacctgaaatttggtcatgcccatcgcttttcccgattcaagataagcgtgttcaatactggcgattcccgtgtacgtattccggatgatcggaagaagcgaatataaaaacagcgacaatatcaccgtattggcgccgagccccatgactagcatcagcaccgcaagcatcgcaagcgccggcacggtctgaatcacgtttgtcaccgcgaatacccagccgcttaatgttctgtgcctggcaatgaagatgccgagcggaaccccaacgatcgccgcaaataaaacgccgtataccgacatgagaaaatggcggtaaaactcctgaagcacataggcgccgttttgagaataataagtgccgagctgctgcagcacttccatttgccccacctcatttcttattcaaaataatgatgtttctccaaaaattctttagcgacgacggacggttctttcagcttgccgtccacctcgtaattcaattcctgcatcgtttccgtatcgattttgccgatcagtttattcacaatgcccttcagttcaggatgctgcttcagcacgctgtcgggaatgaccggcgaacagtcatacggcgggaaaaattgcttgtcgtcttttaaaattttcagatcgtacgctttaatccgtccgtccgttgaataagcgaggacggcgtccattttcccgtttttcacggcatcgtatacaagtccgatctgcatcggataggttgtgccgaattcaaaaccgtacgtgtcggtaaagcctttatagccgtcaccttttcttttcagccacgcattgtctacaccgagcttaaattgatccgcatgcttcttaatatcggacactttgtctaaatggtctttttccgcaagctctttcgtgacggtaaaagcgtatgtgttctcaaatccgtaagaatcaaaccatttgtaatggaagcgtttctcaaattctttctgtacgatggataatgcttttttcgggtctttttccgcttccatgccgagggtgctcgttaaatccgttcccgagtagcgcgtcgcggcgatatcgatttcaccgccgagcatcgcttgctgctggacatagttcgatccgaggtttttaattaatgccgtattcaagtctgtattgtgctcaatcatctgtgcgatcatattggcgataatttctgattccgtcatgctttgcgccccgattttaatcgtatcatcggaagccccgctcaggccgggaagggaacagccgcctagaagcagagcagctgacagcgccagtgcgcacatccatctcttttggttttttttcaaaacagccaactccttatgatacttccttcagtcctttcagccctttcggcgtcaccttccgttccgtcgccgctagcagataatcaatgataatggctaaaatggtgaccggcacggcgccgccgataatatattcaggctgatagagattcaggccgataaaaatatagtctccgagcccgccgcccccgataaaggaagcaagcgtcgcccagccgatcagataaatggtggatgtgcggatgcccgccatgatcaccggaaccgcaagcggcagttccacaagcctgatctgctcccagaccgtcatgccgatgccttttcccgattccagcagatttttgtttacgccttgaatgccggtatacgtgttcctgagaatcggcagcaccgaatagaaaaacagcgcgacgatcgcgggcacctttcccacgcctaacagcgggataaaaaacgccagtatcgcgagactcggcaaggtctgcacaatgttgacggcgccgatgacggcgcctgcgccctttttcattctcgtcagcgccactccgagcggaacggcgacgacaatgcctaatatgacggcgatgatcgaaatgtataaatgctcccacgttttatataacagttctccgccgttcgtctgcaaaaacttaatcatttcattcattgtaagcgttcctccccttgtcagcctgtcaccagctggtcttcctcgccccagattgaatcgtaaacgatgtcgacaaggctcgctctcgtgacaattccgactaaatgcctttgttcatcaacgacgggtacatatttcattccgcgctttaaaattttgcgtacggtatcgcgcagcagtgtcccctgctcgactgtatacagatcagagcggagcacgtcgccgacgaggctcgcttttttccggttctgatcaatgatctcgacatccacatacccttgcagcacattcagatcatcaacgacaagcagggaatcgacacggtgctcccgcatcacctgtatcgcctgtgaaagcgttttgtccgccgtaacggtgacaggctttttattcatcatctgctcgacgcgttcaatatccggtcttgattgcaataaccgttctttgccgataaattcttcgacaaactcattagccggattccggagaatgtcatcaggagtgccggcctgaacgatctctcccgcttttaaaatgacgagccggtcagccagcttaatggcttcatccatatcgtgggttacaaacacaatcgttttattcaatgttctttgcagttttttgaattcttcctgaagggaatcccgcgtaatcgggtcaagcgctccgaacggttcatccatgagaataaggggaggttccgctgcaagggcgcgcagcacgccgattctctgctgctgtcccccgctcagctcgtgaggatagcggtctaaatattccgggcccatatcgacgagcttcaaaagctcccgcgcccgttccttccgcttttgttccggccatttcagcagtttcggcacgagggaaatgttctgctgaatggtcatatgagggaaaagtccgatctgctgaatgacgtagccgattttccgtctcagctccaccgggtcctgctccataatgttttcgccatcgataaaaatctttccggatgacggctcaatcagtctgttaatcattttcatcgtcgtcgtttttccgcagccgctcggcccgataaaacaaataaactcgcctttttcgatatttaaatcaatgctgttgacagctttttttccgcctttatagacttttgatacattttctaatctcagcaatccgtgcacctccgaagggttccgttatttttctgaaaagtataatctttattataagatgaaatttgtaaaataaaaagtttacaatgtgttgaaattatatacaatatacgtattttttcatgttatcccgctgacaatgcggatgttcttacaatcgctcccgatagctcgcatatcctgccgcatcatctttttcatcaactgtaaaaaatatgatatattgtcagcatgaaaagccagtgaagggatgatcagccgtggaaaaaaacgctcttgatatcatcgggcatgctgaagagcatctcattgagagaatcgccgagaatatgcatacattcggaatgccggccacattgggacgtgtgctcggtattatttatatgaaccgcaagccgatgacgttaaatgagctgtcagaggcgaccgggatgagcaaaacgaggatgagccaggtggtccgcgaaatgaccgatgtcaatctggctgaaaaagtgtttgaaaaaggcgttcgcaaagacctttatgacgtcgagcgtgattattaccagacgtttatctccctgtttacggcaaattggacaaaagcggtcagcaaaaacaaaatgctctataaaaagctgaaccgcgagctgactgagcttctggaatcgaaaaatctcagtcccgatattgaagaaaaagcccgtcagcttttggatgaactgacggattggctccattattatgactggctgagccgtttgatagaattttttgagagtgaagaagtgtttcagcatgtgccgaaaatagaaaaaagcagcacccgaagataaccgggcgctgcttttttaagtcaggaaaccaatatcgggaacatgcctttcagaccggcgccgatcatgccgatggccaccaccgccaaaatcagccccatcagtcgggtaatgacgttcatttcggttttcccgagcttattgctgatgaaagatgaatagtgaaagaagatgaacgtcatcgcgatgacggccgcaatgccgataagcacgctgatgtaatggaagatgccgccatggccggccgacagactcatcaccgtcgcgatcgtaccgggtccggcgataatcggaatcgacaaaggcgtcacagatatatcggctttctccttgctctcccctttctcttcatgatggagagactgtacatgagatttcttcgcgttcagaagattataagcgatgccgaaaataaaaatgccgcccgcgatacgtaaggcatgaatgttaatgtcaaacagtttaaagatcagatggccgaagattaaaaaagccgccaagatgataaacgacagcacggaagccttgcgcgcgatcgctgtccgttctttctccgagtacccttccgtcagtgaaagaaaaatcggcacgtttccgatgggattggagactgcaaacagtgaaatgaagacatgaatgatgaatgaaaacatgcgtacctccttatgacttgccgttattgagttatgttttgttctccgctgtttcttatgcatggtttttaccccggggtctgctttttataacctcagccggacaatccggaaacagaaaaaccgtccttgtaaggacggttttttctgtttgctatctccataagccttttccgaatttcaacagccgataaagcattttcaatttttttagcatgcgttaatttcctttttcactctgaatcaatgcgccgagagacatgatatctatcagctccaataaaattctaccataaagggtactttttctctattatcaattcatagagaaggtgatttgtatatctttagaaaactccgttacatccgtcctattttcttttataatgtaaatattgaacaaaatccctatattacttgtaaaaggagttttagaatgtattgttctcaatgcggccatcatactgatggcggaaagttttgtgaaaagtgcggggcgccccagcccgggcagggaggcgcaggccaaacgcaaggccaggccgctcaggccggcgccgcggctaagcaggcttcaaagcaatttgccttattcgtgcttgatgtgttaaagcaaccgtatcaaacatgtaaaacgacaggcggcgaacagcttgtcagcagcatcatcaacatggtgcttttctgcctggtgacgccgattatgttttatattctcttatcagacggctttcgtgacgtcagttttaccgcgattgtgatcaaaccggcgcttacctttgcattatgcgttttttgcctgtatctcttgacttttatcgctttgaaggccggcggcgcgcaggtgtcatttaaagattcgctgtccagattcggggcatttttgattccgtttacagctattttgcttcttgccctcatttttatgctgcttcatacaaccgtttgcttcaccattctggctgtcggtcttttaggagcggcgtttgccgtgcctccgctcatgctggcgagctatcagcatcagctcactactaaggcggatatcatttattctgttatcgtcatctatttgatcatttgcgtaacgtttcaattcacgatcaagcattatataaaagaactcatgaattatttcttcttttaaaaacggaaacccccgccgcctgattggcgcgggggtttattttattgaatggatgttaaataaattcttccgtctttaacaatgccgccatacgtccaattgtatgttctgagcttcggactgccgccggctttcgtaatataaaactcctcgtacgtatgaatcgtcagatgagagcctttctgtgaaaagcttttgacattcacttcattaaatacttcggtcgtcccctcgctgtgcagttttttgaccagtttctgctgatcagcatacaaagggcttccctcttctaaattaccctccatgatcgcgaaattgttaaggctgacggcgcttgattggtttgtcaggtaatcagtcataaacgatgtgacttgttcattcgtgaggctgcctgaagctgtatttcctttggatgatgcccatgcggatgtataggttttcggctggtcgttttttattttttttacatttgtcccagaagaatctgaggcagggtcagctttttcgaaaacccattttttatgttttgtatcatatgagagtacatagtgaaagctcggctcagcctcttccatatcaggcttcgtattcccgtcgaaataagcagactcatgaagctctttacccgtaacagttacttgccagcggccgttctcttgagaaatcgcaaatgaatccagatcaaagcttgtctctttatactgatccttcaaaaaggtgccggaactcttcatgccggataccacttctttcgtctgctctttccaggcggaaccagcctcggtcatctgatcggtatttccgtctgccatcgcttttgtatactgcttcgttgttttgacaatcgtgtccatgattgtttgttgtgtatcttgatccgggataagcgttaagtccacatcagtactgttgatcgggacatcggcagttttcattttcccccaaggaaaatcagcctccacggcggctgtcatggaaccgtcagttaagagcggaccatatgtaacggatgtaaacggatctttatggacagacttgccgtttatcagcagatcgcctttcgcgcttttgaagctgtctgccggagtgaatgtcacatcctcggcgtctaacggcaggtcaaactcaacattccggctgccggccgcctctgcctcttgctttttgacaacgtcaaccgtctcatttttaagcttggcttccgccgtgtagacaccgggtgcatacgggccgaagatttgggtttcatcggcttttttgaccgtacctgttttctcgctgttgatataaagatcggcgcctttataattgcttgtgacccggaaataaaccggatcgactttcagttcgtaatggtcaaacaaaagaagggtttttccctcttttttgacgtataccgcatctgtttctgatgaattgccgcgaagcgatgccagcagttcatcgtgtttctttgcgtatgcaaggagcggtttgacattggtctcattcagcttcagttttttgtctgaaggagtgagcagggctgcgagctttttcgtgtccccgtcatgaaccgcctgttcgaattgatccgtgagccttttttcagatgtcagccaggctccggttttatatgcggcaatcaataagatcagcgctgcggcaatgccgccccacatgaagagcgtttttttagggatcggctttctcatttgtgaagcaggttcagccgcttttacagccgcctgccgctccagccggcttcctttcccgatcggttttccgcattctttacagaaatgcgcttcttcattgttctgctggccgcaatgcttacaaaaaaacatgactttcctcctattcaatctgcaaaacttgtataacttttcctatgtttcatattttataataaagtagaatgattttggagttattttcaaaaatagctgtcgatcataacagaggaggagaaacggacatgcaaaaactgagcatccgaaaagccgcggagccggatgaagcactgtatgaactattgctgctggccgatccgtcgaaagagattgtcgatgattatcttgtaagaggagaatgctatacggcctggacgtcagacgagcttgcaggggtttacgttttattgcaaacaaggcctaaaacgatagaaatcgtaaacatcgcggtaaaagaatcgctgcagaacaggggattcggaaaacagctggtgcgggatgccattgaaaaagcgagacaatcgggggctgacacgattgaaatcggcaccggaaattccagtattcatcagctgtcactctatcaaaaatgcggattccgcattcaggctgtcgaccatgatttttttatcagacattatgatgatgacatttttgaaaacggcattcaatgccgggatatgatacggctttatttggatttatgataaaaagggcgccggctgacatcggcgccccttcgtttaccattcagacggattgatccgcttgtttctctgtatttctttgactcccttgtctgactgaaaaaatagcaaaaacgatcgtaagggtcagtccgaccgccgcaaaaatataatccgcattcatcaacagcagaagccctgtgtagacagcggccgacagcggttcacccattttgacaatggaaaaaatcagtgcaaagacccttccgaaatatgcggccggaaccgtcttttggaaatacagcaccgtttgcacatcaatatacgagatgatgatgccaagcaccaggaagatgatgcactcaaacccatgaaggggaaaaaacaggagcataatgagcagtcccgctgccgttaacgtccgcgggtacagccggttcaagcgttttgtattccatttgaaaaatacggccagattgcccaaaagcatccccgcctgaaacattgaatacatgacggcaaaccatacagaatagttctgctgaaaacgctccacagcaagaatcggccccattactgaaataaggccggcaatgacgagatttacgatgaaaaagtatccgaccgatgtcagccatgccgcatttcctttcagcattctgtaaccggcttttacatcttcagttccgttgcttttttcatcgggctgttctgaaatacgaatgaacgcgataaatgccgcagagatcaaaaaagcagtgccgtttagggcaaacagcatcccgaacggaatagccgcaatcatgatcccgctgatcaattttccgacgatgagtccgatcaagtcactcgtattgatcagagatgtcgcctgatcaagatgctgtttgcggacgagcagcggaatgatcgcgactttcgccggcgcaaacagcatcgattgcagagatagacaaaaggcgcacaccccggctatccacacggttaataaatcgttcgcgctgagcaccgccaagaggatcataatggcggcccgacccgtattgcacaaatacaagatcgacttttttcggaataaatcaatcagcggccccgccagcacgccaaatgtcaagggcacgagttcgataaaagaaataacgccgactagaattttgctgccggtcaattccagcactaacagcggcagagcaatgagccagaccccgtccgctgctgaagaaaacacctgtgcacaccaaagctttgcatagttcggtgttcgatatgtcatatcaggcccttttttgatcctcgtcatcagatacaccgccgaaccattccagcgttctccatgattcccgtctttccgtataatcctcttccatcacctcaaatacaatgccggtatcttgattccgataaagctcctgcaaagtatcggcagcccgtctcagcagctcctcagcgattgtcccttcactcggatggcggccctcaaaacagcggacgcccccatgcgggaacgcaagctggcgaaatgagctgaagtgataatgcttaatgctctcttttatcgacagaaactgaaagaaatcgggatatttcagctgatcatttctgaacataagcgcggaagataagtgagtctgataggtaatcgcccaatggcacagatcccacgtaataccgacatgcttcagatccaactgcaccagctctgtaaaatcctcaggataaatgaaaatcggatcaaaatcctctcccagattcccgatgatcggaaggttttccacaccgatccaaatgtccgtccctttcagccgctcatcaaactccgcgaaaaactcaacgatttttttacggtttccttccaggtcatagacttgaaattcctcaaccgtcataaattgattggcatgaacggttatgcctttggcgccgtatttcacagcgagctccgcaaagtgataaagctgttttttgatgtgatcttcattcacataatcggcatgatctgtcggaaaatgcagcgttaataatgaaggatcaagctgtttcgcatattccagcgtctgattgaatgttttgagataatccgcttcctcaaaggaatggccgtcaaaaatattcgcttccagaccgtatcccgcttccacccatttctcatcgatttgcttcggatcaagtccgaaaaacggaatttgagcaatcataggacagtcaccatgttcctctcacaagcataaacgcttccgcagccgaaaaacccgcttttgctccccacacacgggcattatgttcgatcgcctgcaaagagcggggatgagggaagtctctgagctcggaaccgtaacacgccatcgatttcaatttcgtttcaagctcgtcttcaatattaacgaagaaattggcatgaaactgatccttctgacagtaattccattccgtcgaagacaatgtttcataggcaaaaacccgttttaccgtatgaccgggaagcggacgggttgccgtcatgaccgctctgaatacgacggagtggtcaatattaatgtcaccgccgtactgggtatacacaatgtcaggctgaaaacgattgatttgtttctccgcttccttcacgacatccagcaaatccattgaatccattctgttatcaggaaggttcagcctgacaaaatcatggatgcccaaagtgctgagcgcctgctccgtttcttgattagaatgctccataacggaatcttcaggctttttgtaatccgtttttcttgatgatttgccttccgccataatgactgccgacacgctgtcaccttggcggacatgtttggcgagcgtgccgccgacgccgataatttcatcgtcgggatgcgctgcaaataccattactttcatcatattgccctcctttaactaacatttcggctgtatccgctccgcagttcatcagcatatcaagcatggagaggtgagggatatgctccccgaataattgaggatagccaaaatgtcggatctgctgatactcaatgacaattccgtttctttcaaaatcgctttctattaaatagtcggaaccctgactgcctgaataataacggtccgcccccagctcctgacaaagcgctaaaacaaaatcgctttttttctccttccggcattcaagctcagagacataacagagcggcgtttcaattcggagctcttttcggaaaaattcaatgatgtgcatattcaaatcatggagatattcccactcccgctgatagacatcttgaaaaaaatgctggtatcgctcaaaatagggagctttcgcatagttcattttaatcgccatccaatgttttttccgccaatcctgtgtctggtcgattttcatatgccgaagctctatgtctttatattgtttcatctgcaaaggcactgtcagccatctggggccttgcggcgttttgattctgttgcggttgagaaatccttttttctcaaattgagctgtgtcatgaatggcaaacagatccgacttatacattttttcaaaaaaaccgtaccacggcagataactggattgatggccgcttattgttttcattccggtttcgtaaaaagtcggcattgtttttcttcagctccccaatatcgtttcggtcttgcgatttctttactgtgtgaatagccaaaatcagcccattgaagcttgcggcaaatggcgaattgcagggcgtcacgcatcaataagtaagaggcctgcgctttttttcccgccaggctgtttacattctgccaataatagaaatgagagcggtcatagagaaaaatactgctgctgatcagcgtctcatcctgatatgctccgatccaaaacattcggtccgcaaacgtgtcaagcagcttttggaaaaagccctggctcagcacataagccgcgccgattgccgatgtatgctctttgtagaggtcataaaacgcgccaagttcttttcgcccgatcagccgggtgacaatattctctttttcagcgtatctgactgctgtccgggcttttccggaaatgcccgtccaaagctcgtcaaacgtgtccggaagcgaaagaatccgtgtcgccttttccgtccatccttccctgatttcttctgtaaaagaagtctgaccgtacggcagcagcatccgggatatgttccggccgaatatggcctggatttcactttgaagccattcaaatgagatggggcgatctgaaataacgccgccgtatccgatcatattgccggataatacgcccttctgttcaaaaagcggaagatagatgacctgtcctccgtccgttgtcagtctgacagggtgaaatgacgtgccgggaagctcttccatgaggattccccaatcatagctttgaaacaatcccgcctgatacatgtcagcggcccgatcccatgcctggcgggtcgtgcatactgctgttttttgcatatttatcaccactattcagtcttattctgttgctcacaatatgataaaacggattcggctatatatctgacttgctccttttgaagaggaggtttaaacggcagggaaagaactctcttccaaagcgggtcttccccgccttcccccgcgtatgtttcataaatcggaatacgttcgaggggaagatagttccagcatgtttggatgcctctttcggctaaataaacggaacacccgtaccgctcttcatcccggggaaatacaattgttaaataattcagatgttctccttcttggggctggatcattcttatgccgtttgtttctcccgcctttgcaaagatttctcccgccgtctctatgtttcggagcgaagctgttacaagctgatccatacgtgaaagctgatcatcaataatggcttcccttgccggatgcatgcgaagcacgggtacaacagccggtttatccggcagagtttcgagctttgtggctttcatggaaggcatggcgcccgcttttctaaacatatatgaaataggatgatgccgtttccgtttcattacagcttggattctttgatttctgatatagattcgatagtcagctgccacttggctgcgctgttccatcgggagatttgctttttgccgaagccattctttcggcgcgattaacgcgccgcctccgatactcgcaagcggctttgaggggccgaagcttaaaatgccgaaatcgcccaaaccgccggcaaatgtatccgcttgttttgtaaacatggcttgagcggcatcatcaatgacagcaattccgttttccttcgcccagttaatgatagcggtattttctctccggccgtatacatgtgtgaggataaccgcacacgtacgcctcgtcgctttttttttgacatcctcaaaagataaggatagatgctcatccagctgcgcaaacacaggcgtcgcaccggattgcagcacggcatcaatgacattcgggcagctgaaggatgagaaaatcacttctttccccggtccggcccccgaataagttaatgcgagcaccagtgccgcactgccgctggaggtcagcacgaccccttttccgtaacgtttttccagtttttcagtcagtccgctttgtccggcagtaagcaagtgcttcaccgcgcgcagacggccgctgactgaaaactgacccggataaatgggatacttgatctcttccgggtttttaggaaagtgaaagtttgtgcttttgtctttcatcttttatgatctccaggccttcattcagacttactttcggagcgtaaccgagcaaacgtttcgccttctcgattgacggcgcccgtttaaaaatctcgatgtcttttcccctcacgccgtcttcgcccagctttttatacagatagttatccttctctctgcctgagagcacattgactttttcagccagttcttttatcgtgatcggctggtcgttcccgatattgaagtcttcaaagacggctccttcatgaatgagagcgagataagttccggtgatgatatcactgatgtagctgaagcagcgtatttgtccgccgtccccgtaaagaggcagctcagagccattctcggccaggctgaaaaacttgttgatgacaaaatcctcgcgctgtttcggcccgtatacattaaagtaccggacgacccgaatatgaagttcgtcggaagcctgttctctcaaatattcctctgattgcagtttggcttttccgtaagctgatttcggaagctttctgcttgtctcggtataaggaaaatccggtgaatctccgaacacttctgaactcgatgagaaaagaagtgtgctgattcccaattcaccgcatacctcagtgacgtttttcgttccttcaaaattgacccgtatgacgtcttcttcattgcttcggcagctgtccactccgaccattgccgccaaatggacaaccgcatccgctccccgcagtgattcgcggagggacgtccggtcaaggatatccgtttggcggtattcagtgtcaaaagccggcttcttttggtctgcaatgatggtgtgataacctttatcctgtaataatgccgccagttcgcttccgataaaaccggctcctccgataatcgcaatatgtttcatgatcctacctcctggctgatagtcaacacttcttttatagacttgacaatatagctgcaatcctcatctgataactggctgtaaagaggcagtgatacgatctcccggaaaacacgttcagttaccggaagctcggcaggaaaatgttttttatagtaaggatgcaaatgcacgggaataaagtgcacgctcagcccgatttgtttttctttcattttctcaataaacagatctctgtccataccgccgttttctcgaatccgcaaaataaataaatgccatgagtgcgttatgccgcttggaatgtcagaaagcggaagcgccgctttgtcagattgacctgacagttcacgtacataaaattgagcgatctgttcccgtttttcttgaatgtcgtttgcgcgtttcaattgaaccagaccgagcgcggcctgaatatccgtcatattatatttaaagcccggcagtaaaacgtcgtatctccagctgcctttttcaccgtaccggttccaggcattttttgtgatgccgtgccagccgtacagcctcgctctttctgcggcctgttcgtctttcataacgagggctccgccttcccccgttgtaatatttttggtggcataaaagctgaagcacacggcatcgccgtgagtgccgatcatgcttccgttatattttgtaccgagcgcatgagcggcgtcttcaatcagatacaatccgttttctttacaaatggattgcaagttttccagatcagccggatagccggcaaaatgaaccgcaattaccgcttttgtgcgcggcgttattttcttcctgacatcttcaggatcggcacatagacttttctcgcatatatccgcaaacacaggaacggctccggcgtgcagaatgacattgacgctggaacagaacgtgaagctcggcacgatgacttcatcgccttctcccaccccgagcgccaataaagccatatgtaatgcagcggtgcctgaattacagctgatgacgtgttcggctcctatacattctcccagctttttttcaaaatcgattaccttcgggcctttcgaaatccagcccgattgaatcgtttcggttacgcttgcgatttcttcgtttgtcatatcaggtctgtgaaaagagataaatcgattactaatgaccgttccctcctataaagtgacaactctgcaattgtcggctgatttttccttgcatacatttcttgtgtcaaagataatcggtgaggcatccttcaaaatactgtagtcgattacatcgtgatctgtatgaatgatgatgacgtcgtactgattgatttgttcttttgtgaaagggacagattgtttgcggcttccgtcattcaagcggatctcgctgataaacggatcatgataatcaatcgcgcatcccttgtccatcaattcttccattatcgtaaacactgaggattcacgcgggtcatttgtattttttttataagcggcccctattattaagatgctgcatttgtctttgcccgccagttttaaagcatagtcagagacagaaatcggcatgttggaattgatttcgtccgcgagatcaattaattttgtctgcagccctttttcattcgcgatccatttgaagtaaaaaggatcaatcgggatacaatggcctccgactccggggcccgggataaatttttgaaagccgaacggcttcgtgtccgccgcgcagatgacttcccatatatcaatatcaagttcacggcaattaagcgccatttcattgataagagctatattgacataacgataagtattctctaggagtttagctgtttcagctacttcgggtgaggtgaccgggtgaatgcttgtaacaatggtgctgtaaaacgctgaggcaagttctgtgcaagtctgtgtggttccgccgactactttaggaatatctgaaacttcatattgcctgttgcccggatcgattctttccggagaataagccgtaaaaaagtctgttcctattttcatgccgcggcttgatgccattctgtcggcaatcttttttttcgttgttccgggataggtggtgctttctaaaattaaaagctgatgctgccttccataagcgatcatgctgtcaactgcactgtcgatgtaggttaaatcggggatcttgtcttttttgttcaggggtgtcggcacacatatcacaatgatgtcgcatttttggatgagcgacatgtcggcgctgatttgaaagcattttgtttgtaaagccgagttcagtctgtcgtcctctatatcttgaatatggctgcttccggcggctaacaaggaaaccttttcactgtttttgtcgaacccgataacattgtatcctttatcgacgcattccagcgcaagagggaatcccacatatcccatgcctaacacgcctacaatcgcctgcttcgtttcaatcagatgtaacagccgtttttgaccaaggttgctggcttcttttgtgacagtattcatttttcgccccctaatagatagaaaagagtattgttttttacaatttaaaacaaatatcgatcgatatcgcaattataacaaaagttaaaatttgataaatgagttttacatccttttataaattaggtattatctatttatttttcttttatttgtaaaataaaatcctgtcaaatggtatatatctggtaacaagtgagaaaatctcccttaattgagggaatatacagaaaacaatataaaaaaacaggccgaagcctgttttttattctttcactgcctcagttacagcagcggaaacgagtgatcccgctttctctaatctttctttgctgatgtgtttcatattatcattctcggtgtgataccaaggccccggctcctgtgtatcggggctgagccaaatccagttagccgacggaatccctgcttcataaaaagagacatggtctgagtaaccgagctgaatcaggtttggcttgaccaagcgggatttttcagtggctttttcagcataccggacgctcgggttttccttgccgtcaggagtcgtgacacacatttgactcgcttcttcccagtcagtcgcaatcatatcggcattaaaattggcctggctgtgctttctttcattgttcgtgagtgtactgacgtaataagatgaacccgcagaccataattcttctgcaccgaacaggataaagcggatctctttgtctttcggtatgtgtgtcaattgtttgctgatttccagaacggcagatgtgcctgaggcgttatcatccgctccgggcgcgccttttacgctgtcataatgcgctgtgacataaataatatcagcatcagaagagttggcctgtgccgctttgcgtgttcctataatattttgtgaggtgcggtttttatagtttttaaattgaatgactgcctgcttttcctgcagcagtgcttcaccgtcttcttttttcatacccgccgccggtatcgtgattcctttatcggtatgcggacggacggcgagcggttttgttgtctgattataaataatgactgctttggctcccgcttgttcggcatgtttgatcttttgagaaacggggatctttccttcgcgtatcactgcaatctttcctttggctcctgttacgtcatcgcgtgatccgcagccgccgtcaaaaatccctccctcaattctcagctctttttcaacagcggattgatcagcggagcggagcgggaattcatgatctcccgctgtgactgaacctgaaaagtactttttcaatggaaatgactgtactttgacactggcgccctgagcccgcaggcgattcgatatgtattcagccgcttccttttctttcgcagttccggtttcccgcggtccgatggtttcactcagatcatgcatcgtgtccaatgcctcatcagcatcaaaaaccggcgcagtcacggctgaataagcatgagtttcggacagcggcccggcagacgcgccccatatgacgcttgctgccaccgcggctgacataaatgaaaatttcatcataatccctcctcttattaacacctcttccctttcgattgaagaacactgattcctttaaaaaggggaaaaatgaatattattgaccaaatgaagatgatgaaaaaggagggaaaagcccgggagcataaaaaaacgccgggagaatatctcccggcgtccattccattacttattcaagttatagaaagagttgataccgtggtattgagcagtttcagccaactgatcttcgatgcgaagaagctggttgtatttcgcaacacggtccgtacgggacggagcacctgttttgatttgtcctgcattagttgccacagcgatgtcagcgattgtgctgtcttcagtttcacctgaacggtgagagataacggcagtgtagcccgcgcgtttcgccatttcgatcgcatcgaatgtttcagtcaatgtaccgatttggtttactttgatcaggatagagttgcctacgccgtttttgataccttcagcaagctttttcgtgtttgtaacgaaaaggtcgtcaccgacaagctgaacttttttgccaagacgctctgtaagaagtttgtggccttcccagtcgttctcgtcaagtccgtcttcgatagagatgattgggtatttagaaaccatttcttcgtaccagtcaaccatttcagcagatgttttcacaacgccttcgccagacagatggtatttgccgtcttctttgttgtagaactcagaagatgcagcatccatcgcaagtttcacttcttcgccaggtttgaagccggctttttcgattgcttcaacgattgtttgaagcgcttcttcgttagaaccaaggttcggagcgaatccgccttcgtcacctacagctgtgttcattcctttagcagaaagaactgatttcaggctgtggaagatttgagcgcccatgcgaagcgcttcacggaagttaggcgcgcctacaggcatgatcatgaattcttgaatgtctacgttgttgtcagcatgctctccgccgtttacgatgttcatcatcggtacaggaagcgtttttgagttgaatcctccaaggtattggtaaagaggaatctgtaagaaatcagcagctgcgcgcgcacaagccatagatacgccaaggattgcgttcgcaccgagtttgcctttgttttcagttccgtcaagctcgattaaaagctgatcgattgcgttttgttcagttacgtcaaagccgagaagctctggagaaatgatttcgtttacgttgttaacagcagttaacacgccttttccaaggtaacggtctttgtcgccgtcacgaagctcaaccgcttcgtattcacctgtagaagctccgcttggcactaatgcgcggccgaaagctcctgtttctgtatatacttcaacttcaactgttgggttgccgcgggagtcaaggacttcgcgtgcataaacatcaacaatgtatggcatgagtttgtctctccttttgatttacgcttatttttgaattaaagatgttccggtcatttctttcggtttttcaacaccgagaaggtctaataacgttggtgcgaggtcgcctaggattccgccttcgcgcagcgtcacgccttctttcgtcacaatgacagggactgggtttgtcgtatgggcagtgtgcggttcgcctgtttctgtaatcagaatgtctgcattaccgtgatcagcggtaatgatggcatgtccgcctttagcgatgatggcgtcaaccacttcgcctaagcattcatccactgcttcaattgctttaatcgtcggttcgaccattccggagtggccgaccatgtcagggtttgcaaagttcaggatgatcgcgtcgtgcttgtcagccgcgatttcttttacaagagcatccttcacttcatacgcgctcatttcaggcttcaggtcatatgtcgcgaccttcggcgagttaatgaggatgcgctcttcgcccgggaattcttcttcgcggccgccgctcataaagaacgtaacgtgcggatacttttcagtttctgcaatgcgaagctgttttaacccgtgctgtgctaatacttcaccgaccgtattgtcaaggtttaccggtttaaaagccacatatccgtcaacagattcactgaagtgagtcaggcagacgaaatacaggtttttcggatgattttcaccgcggtcgaaatcgcggaaatctttgttggtaaacgtgtttgaaatctggatggcgcggtccggtctgaaattatagaaaatcacagaatcgccgtcatgaattttcgcaacgggttcaccgttttcttttgtgatgacggacggaatgacgaattcatcatgaatgccgttcgcataagaatcgtcgactacatccatcgcgctgcggtaagacgggccttcaccgtaagccattgcgcggtacgctttttccacacggtcccagcgtttgtcgcggtccatggagtagtagcgtccggaaatgctggcgatttcgccgacaccgatttcttcgatttgctcattcagctgctgaatgtaagttttcgctgtttgcggacctacatcgcggccgtcgaggaaaccgtgaatatacaccttcgtcagtccttcacttttcgcaagcttcagcagcgcgaataaatgattgatatgactgtgtacgcctccgtcagaaagaaggccgaacaggtgcagcgctttgtcgttgtctttcgcgtttttgatggcgtcaaggaacgtttgattgcgttcgaattcgccttcgcggatggcaacgttcacgcgtgttaagctttggtacacaatacgtcctgcgccgatattcaaatgaccgacttcagagttccccatctgtccttcaggcagtccgactgcttcgcctgatgccgtcagcgtctgatgagggtattggttccaataacggtcgaaattcggttttttcgcttgtgcgactgcgtttccgactgtttcattgcgtaatccgaacccatcaagaatgatgagtgcagctggttttttactcatattgaccttcctccaataattgaacgaatgactgcggttcaaggcttgcgccgccgaccaaagcaccgtcaatatcggactctgccatatattctttaatatttgcaggttttacgctgccgccgtattgaatgcggagcttgtcagcagtttcctggctgaagctttcagcaacgactttacggatatgcgcgcagacgtcgttagcatctttcgctgtagaagatttgcctgttccgattgcccagattggctcgtacgcaataacggaagcggcaacttgctctgcagaaagacccgcaagaccttttttcacttgatcggcaacaagatcatttgtttttccggcttcgcgctcttcaagcgtttcacctacgcaaatgatcggcacaatgccgtgtttgaaagcggcatgcgcttttttgttaactgtttcatcagtttcagcgaacatttcacggcgctcagagtggccgatgacgcagtaatccacgccaaggtctttcagagcgaccgggctgatttcacctgtgaacgcaccgttttcttcaaaatgcatgttttgggcgccgactttcaggtcagttcctttaacagcagaagtcagcttttctaagaaaagagctggtgcgcaaacaacggcttccgctttgtctgctgctggaatggaagatttcacttcttcaacgaagctgacagcctcgccgagtgttttgttcattttccagttaccggctataattggttttctcatctgttccacttccttatagcagtttttatttatcgttcagcgcagctacacctggaagctctttgccttccatgaattcaagggatgcgccgccgcctgttgagatatggctcattttgtcagcaaggccgaatttttcaacggctgccgcagagtctcctccgccgatgacagagtatgtatcgtttgcctctgccaatgcttcagccactgcttttgtgccttgagcgaacaagtcgatttcgaatacgcccatcggtccgttccatacgacaagtttgctgtttttgataacttcagcgtacgtttcgcgggttttcgttccgatgtcgatcgcttctaaatcacttgggatctcagagatcggcacgatttggacgtttgcatcgttagagaaatcatcagcaacgagaacgtcttccggcatatagaatttaacgcctttttctttcgcgcggtccatgaatgattttgcaagttcgattttatcttcttcaagaagagatttaccgacttcataaccaagcgcttttacgaatgtgtaagcaagacctccgccgatgatcaagttgtccactttatcaagcagactttcgattacaccgattttgtcttttactttcgcgccgccgatgattgccgtaaacgggcgctcaggatttgtcacggctttgccgagaacgtcaagctctttttccatcaggaatcctgcaaccgccggcagatgctcggcaattccggctgtagatgcgtgagcacggtgggcagcaccgaatgcgtcattgacatatacatccgcaagctcagcaaatgctttagcaagctcaggatcgtttttctcttcaccagggtagaaacgtacgttttccaatacaagaacgtctccgtccttcatatcagaaatttgtgcttttacagcatcgccgtaagcttcatccgcttttttcacttctttgccgagcagttcgcctaagcgtgcagcgacaggagttaaacgaagctcctcaaccacttcgcctttcgggcggcctaagtggctcgcaagaaggactttcgcgccttggtctgcaaggtgtttgattgttggaagcgcagcgcggatacgagtatcgtctgttacttccccgtctttcattggaacgttaaagtcaacgcggcagaatacgactttgccttttacgtcgatgtcttttactgtttttttattcatgccttaggagatcctccttcaaaatggtttgcatagcacgaaaaacgtgaaacgtgaaaccgcctcatgatgcttccgccgcggggcagattgcagcttccgggcacgggacagatcgttttctgagccagggcaggcggctcagaaaacgaaagtgccgcggaaacttcaaaacgcggacgttctgcagcaatccggcgctttctgaaagccggttctcatggaaaaagggaaagggagtccgtccccttcccttgtccgctttcattatagcgtttctgtccgaaagaaccaagtccggccctttccgggagctatgaattaaagaccttgttttgcgatgtaagctgcaaggtcaacaacgcggttagagtagccgctttcgttatcgtaccaagagattacttttaccatgctgccttccataaccattgtagaaagagcatcgattgtagaagagttagcattgccgttgtagtctccggatactaatggctcttcgctgtagccaaggattcctttaagatcgccttcagccgcttctttaagagctgcgtttacgtcttcagccgttacgtctttgttcagttcagcaactaggtcaacaagagaaacgtttggagtcggcacacgcatagctccgccgttcagtttgcctttcagttcaggaagaacaagggaaactgctttagcagcaccagttgatgtaggaatgatgttttcagctgctgcacgcgcacgacggtagtctttgtgcggaagatcaagaatttgctgatcgtttgtgtaagagtgaacagttgtcatcataccgcgtttgatgccgaatttgtcgttaagtacttttgcaaacggcgcaaggcagtttgttgtgcaagatgcgttagagataacatcgtggttagccgcatcgtatttgtcttcgttaacacccataacgattgtgatatcttcttcgttagcaggtgcagagatgataacttttttcgcgcctgcttctaagtgtttcgcagcgtctgcgcgttttgtgaagaaaccagtagattcaactacgatttcaacgccttgtttgccccagctgagtttcgcaggatcgcgctcagcagaaacttcgattgttttgccgttaacaacaaggttgctgccgtcaactttaacttctgcatctaattttccgtgtacggaatcatattgtaaaagatgagcaagcatgttagcgtctgttaaatcgttaaccgctactacctcaacttcaggattgtttaatgctgcgcggaatacgttacgtccaatacgaccaaaaccgttaataccgacttttactgccatgattatttcctcctttaaataagtgagagatatttatattgagggactgttatcccttaataacttctttgcggctccttcgtccgtgacgagaaccgtgtttcgctgctttttaaaataagcttcgattgcttctgcttttgatgatccgcccgctaccgcgataatgtcgggaatggcatcgaggtcatcaagctgcattccgactgaatgcaccttgtgaacgacttctccgtccgcattaaagtagtagccgaatgcctctgtcaccgcatgattgtcatctattttcttcaaatcttccaaaggcgtgtttcttcgctccgccattgttctagcttcgccgattccgtgaacgagcatactcgctgatttaatcgtgtgaagcacctcttttacggaaggttcttcaataatagatgagtaggcgccttgtgacagctgcccgggaacgaacaaaagccggtaagtgcctgaagccttttccgccatatgcgcgcatatggtgttcgcctggtttttcacatcttcgcctaaaccgcctcttgcgggcacaaacaggagctcgcggttttttgaatccggcgtcatcatatcggcgacggcttcaattgtcgtaccgccggttacagcgacgatatttttgcctgaaaatctctttttcatacatgcaacggccgctctccctaattcttttttgacccaaggagattggtcgctgtctccggaaacgataatggcgtctttcagattaagccgctcttttaatgtcttttccaaaagcgtcaaccctaaaacatccttcatcgtatcttccagaatcgaaagcagtgaatagccctcttccgtcattgtcatgccgtttgttttaatatcgatgagattctgttctttcaaaaactgaacctcgcttctgagaacgcgctcggtcaatccgaggctggctgcaagacttctgcggccgatcggttcggtaagcctgatatactgcaagatttcaaatcttttctgcatcacaagcaaaagatcaggcaataattttttttgagcttgtattaactggttcatgactcaaacgttccttcctattcatactggacagaaaatgtcccgctatgacaaaaaacgtcccatcatagccaaaaaaaattatgtctgctttctttaattattttaacaggatgacattgttaattcaactgttaaaggtcaattcctcgacattcttcgcaggattttccagtatctccttgatacagtcattatatacagaaacggaatgaaggtgacagacaaaagcccgccggagcggacttttgtcgtaaaacgctttcattttatccagagtttttctatttcttctaatgatttatttttcgtctcagggcagatcgtcacgacaaacaagaaacagagaatattaatgacggcgaatatccagaaggtgtacgcgagccctaacccgctgatcatcatcggcacgaactggccgatcgcccagttggccccccataagaatatcgtcgcaataccggcggcgcgtgcgcggaggtggttcggaaagatctccgaaatcatgatccatgtaatcggcccgactgatacgcagaaagcggcgacgaatcccaatatgatgacgactaaagccggaccgctcgccagctgaaaataaaaggatgccccgattaagatcatgaacagcgccataaaggcagatccgacccccatcagctttttccggcctaccttatcgactaaaagaaccgcgataatggtgaaaatcacttcaacgacaccgacgatgcatgtcgtgataaaccccgcattctgtccgaaacccatcattttgaaaatttccggcccgtaatacgtaattgcgttcatgccgatgacctgattgaataaagccagcagaatcccgatcacaagcgcttttctcagccccggcttaaacagctgagacaatgaacccattttttctaattgtaaagacgtttcgatttgtttgatttcttctttcgcggtctgctcgccgttaatgcgcgtcagcacggcgagggcttcatttcggcgccccgctttcgcaagccagcgcggactttccggcacgataagcagcacgataaaaaagatgacggacggaatcatgccgtaagcgagcatccaccgccagccggtgtgcactccccattcatacgagccggactgctggacggcgaggttaataaaataagtgccggatatccctaatatcgtaaacagctgatacagggaagacagactgccgcgtatggccggcggagcggcttcggtaatatacgtgacagaaagcgaggagcccatgccgattcccagaccgccgatgactctggcgatcactaaggaagacacactttgagaaagcgcagagacaaccgctgacaccgcaaacaacagcgccgctgccatcaaaatctttctccgtccgaaacggtcactcaaaaatccggaaatcccgacgccgaaaacaccgccgatcataatgcttgaaatcacgagcccttccataaaaggacttaagcggtacaaatctttcaggaaaccgatagcgccggaaatcaccgccgtgtcataaccgtacaaaagccctcccagtccggccgcgcatgagatgagaatgacaaaccacttggaatgctgccgagtgacaggtacatttgagccaattggtgccgggtgattcttcatgaattttaccctcccgcgaataatagaataaaaacgcttacaaatctgagtgcggcgcttgatgttgctttgttttcttcagaaccgccacatttgtacgtacttataaagaattttatctaaaaataagggaaattagtacgtacaaataaagaataagcagtttttcataatctgtcaattatttttacagcttgatgaaagggcttactatgttatactggaatttgtccgtatacattttggaggaattgatatgctaccgaaatatgctcaagtaaaagaagaaatttgttcatggctgaatcagggaaaaatacagccggacgaaaagctgcctacggaaaatgagctgatgcagcagttcggcgtcagccgccataccatcagaaaggcgatcggagatttggtctcgcaggggctgctgtacagcgttcagggcggaggcacctttgtcgcttcacgcacggcgaaatcagccatgcattcaaacaaaacgatcggcgtcattacaacgtacatatcagactatattttcccgagcatcatcaggggaatcgaatcttatttaagcgaacagggctattccatgctgctgacgagcaccaacaacaatacagaaagtgagcggcgcggtcttgaaaacctgctgtccaaaaatatagacgggctgattgtcgagcctacgaaaagcgcgctgcagacgcccaacatcggctactatctcaatctggagaaaaacggcattccgtttgccatgattaacgcctcttatgcggagctggccgcaccaagcttttccgtcaatgatgtcaaaggcggcatgatggcttgcgaatacgtcatgtccctcggccacacgcacattatgggaatctttaaagcggatgacacgcagggcgtcaaacggatgaacggctatctgcaggcgcatcgggagcgcgggattttcccgtctccggacatgatcgtcacttacacgactgaagaaaaagaaaccgtgcttctccaaaaaattaagcatacccttgagcaaaacagcggatcacacccgacggccattctttgctacaatgacgaaattgcgctgaagacgattaatcttctcagggaatttgggttaaaggtgcctgatgacgtatcggtcatgggctatgacgattcacatttcgcccagatttccgaggtgaagctcacctctgtcaagcatccgaaatccattatggggaaagcggcggcaaaatacgtcatcgactgcttagagcataaaaaaccgaagaaggatgacgtcgtgtatgaaccggaactcgtcatccggaattcagtcaagcggatcggcgaataaaaaaagcaatgtgcgcggcacattgctttttttgctcagctgttttttaattcggcgatgatctcaaatgatctcattctgtcggcatgctcaaagctttctgaattcaccatgatttcatccgcctgtgttgtccggatgaagctttccagcttttccttcacacgctccggtccgccgacgatcgttgaactgagctgttcattgaccatcgctttttcatacggcgaccagatttgatccatgtcttcaacaggaggcttcagctggttcggcgtgccgcggacgaggtctaaaaatctttgataatgcgatgttgccagatgctccgccttttcgtccgtatcggcggcaatgacggtgacgccgaccatcgcgtacggttgatccagtacgtctgacggacggaaggagctgcggtacagctcaagggcgggcacggtgtttttcggtgaaaagtgagccgcaaaggcgaacggaagcccgagctctcccgcaagacgcgcgctgaagccgcttgagcccaaaagccagatcggcacgtccagcccttcgcccggaatggcgcggacttgattgcgcacattgcctgtcggtttgaagtaatttctcaattcttcaagctgctctggaaaatcttccccgctgtttatgtttcttcgtaaggctctcgccgttaattggtcggtccccggcgcgcgtccgagccccaggtcaatccgccccggatacaacgtttcaagggttccgaattgctccgcgatcacaagtgaagaatgattcggcagcataatacccccagaaccgacgcggatttttttcgtgcctccggcgatgtggccgatcagcaccgccgttgccgagctggcaactccttctatattatgatgctccgcaagccaatagcggttatagccccactcctcggcgcggcgcgctaaatccatgctgttgcggaacgattcagcaaccgttcccccctgtacgaccggcgataaattcaatacggaaaacgcagtatctttcaatgtatgttcagccatcgttttctcctttgcggtttagtgtaagcagatcttaaacaaggtctctaccacacaccttaccacagcttttcccgtgagttaaacaatttgattcgatgatcttcgaacaatcagtcagcggtcgtcactagtgaactctttatgaatgaatctattacattcagatatgatgagcttttcatcctataaaaatgaaaatctatcgttgaaagaacagacccaataatgttaagatatgtatgatattgaataggaaggaagtcatagtctatatgcgtaaaaaaatcttaatggcacttacaacagctttactggcagcaatcttctttacaggaaacaccgataaggcatatgccgcagacttttactccggcactcagcagcatttaaatgtaagcggatttaccgatgcctcctactacacgaaaaaagcgaaaagtgtcgattttactctcagtacagcgtatccgtcagatcgaacttttaaaggaaacctatacttacagcgaaagtcaggaaagaaatggacgacttgcaaaaagacaagcttcactttcaaatatcacgtaactaagtcattccctttaaaaggatgcaagacaggttattatcgtgtcaaagccacgttcagcggttcaaaacttgtcaatacgacaaactcttttaaaattaaccgataagattcagggccctaagatgattagggtctttttattcattctttgtgagttcctgcgcgatttgaataaaaagttttgccgccaatgaagcttcctttacggaaggaacggcaagcagaacatcgcggtacaccgcctgattcaggtctctcgtcacgacattgtccggcagcgatattcccgacatagacatttgtgataatatcgcaatccccagcccttctttgatcatgctgatagacgtattgacattgtaaacagtgaatgcggaagtcagcacagatcctgcctccctaaacatatcaataagcggtgattcgtaccctccgtcacagatgatcatcggctggcagtcaaggtctttcagagtgattgactcacagctgcaaagcggatgatcatttctaagcacgacggccattttatcttttttcaacggcagatattccatgtcttccgtaggaaaaagagtaatacctgcgtctattacccgggagcggagccattcctttacttcgttgaccgttccttcatgaagcaccaattcaagcttcggataccgctttttaaacatgctgatcagctttggaatgaaataagcggaagcggccggaaatgtgccgatatgaattgttccctgttcaagccctctttccgcggccgccagctgctcggctttttctatgcctttgagcacctctctgatatggacgagaatttttccgcccgtgtccgtgagccttacgccgttgcggcgctcgcggatgatcagcttgatgccgagctctgactcaagcgcagagatggcatggctgacagcgggctgcgtcatattcagcgcctgccccgcttttgtaaagcttcccgtttcagcgatttgaacaaaaacccgcagttgtgtaatcgtcataacgttttacttatgctccttataaaaaagattcattttatttatcttactgattaccgtatcatatgatggaattgttctacaaggagtgaacgacgtgaaacagctttcgaaaatacagacggctcttatgctggcgtttctagtcacggtgtggggaattaactggccgctgacaaaagccgcgcttgcctattcgccgcctcttctgtttgccggaatccgcacgctgatcggcggacttctattattaatggtggcgctgccccgttttaaaaagctgcgttttaaagaaacgtggccgatctatcttatttctgccattttaaatattactttattttacggcctgcaaacggtcggcttgaattacctgcctgccggcttattttcagccatcgtgtttttccagccggtgttaatgggcgttttttcttggctgtggctcggggaatcgatgtatcctttaaaaatagccggtcttattctgggctttgccggtgtcgccgtcatcagcgcagccggtttcggaggccatatttccatcgccggcattcttttggccttaggctctgcggtcagctgggcgctcggcacggtatatgtgaaaagaacgggcggacgcgcggactctatctggatggtcgctctgcagcttctgatcggcggcttgctgcttgtcagctccggccatttttcagaaagcttttcagcgattcaatggaaagctccgttcattctcagccttctgttcatttcagtttttgttatcgcgctcggctggctcgccttttttacgcttgtcggttcaggggaagcaagcaaggttgcctcttacaccttcctgatcccgctcatatccattaccgtcagctcgatattcctgcatgagccgctgaccgtcagccttttagccggactgcttctgatcgtcacaagcatttgttttgtgaatataacaccgaagaaactgaaaacacctgctctggccgcagaaaaaaaggccgttcattaaaaaaactcttgccgcggggcaagagtttttttatttattgacgtctccctttcacgagatacgcagccgtaatgaggagatagatggccgcagtgatgcatgtgatgacgatggatgtcgtcgcaattacgccgatcaggatggccaaaagcgcaagcaccgcaaaccatgtcgtgtacgggaaccatttgacgtaataagccggctgttttgttgaatgttttcttgatttcaaatgggcgaatccgataatcagccagatgaacagcacggtatagccaagggaacccatcaaataattaaacgtctggcttcctgcgaataaagaaatcaggacgcctacatataaaaatgacgtacaagtcagaatcgcatagacgggaacctttttcttcgatagttttgaaaagattttcggcagccggccgtcagaagcctgcgtaaacaagacgcgggatgatccgtacagtcccgagttcatagacgagataatcgcaagaagaatgacggcattcataatatggtcggcacccggaattccgatcatcttaaatactatgacaaacgggctttcgggaacgctgttgacttgattccaaggaatcaggctgacgatgatgaaaaacggcagcaagtaaaaagcgacaatccgcgttaacgtgcttcggacagctttcgggatcaccttttcggggttttttgtctccgccagcgtgacgccgatgatttccgttccgccgtatgagtagatcacgacgagcatcgccgtaatgacaccccccgctccatgcgggaaaaaccctccgtgatccgttaaatgagacagccccggcgccgtgtgattgccgaatgagaaaaataatagcagaatcccgcataaaataaagatgacaatcactgtaattttaatgagcgcgagccagtactccgtctcggcaaacagtttcacagaaagcatgtttacgaccgtcaccacaatggaaatgatcaaagccaatatccatatcggacattccggcagccaatattgaatgaaaatggcggctacgaccgcctcagcggcaatattgagcacccacattttccaatagatccagtctaaaaagtatgcagcgtacgacccgagagactgctgaaccaaatcacggaacgtccttgcatgtttgtttctgacagccatttcggccagcccctgcataataaacagcagaatgattccgccgaggaggtaggccagcagcacggacggccccgcttcatcaatcgccgtgctgctgcctttaaagagcccggccccgattgcgcctccaagcgccatcatcataatgtgtctggacgacatcgtccgttttaacgtttgcttgtccttttccatctatcacacgccctctcgcaaaaagtgttcatcacataaaaaagcacgccgcctctttgggaaaagagacggcgtgcctcaggcagccgcggtaccactcttgttgatcccgaatatccggaatccagcttaaaaaccttttaacgaaggtcagccgttaggacatagggaatattccgataattccgttccgccctgccacttccgggcgagttcaaagaacaatcagtccgcgttgcaccaacccgcggctctctttttctgactggattcttttactgctcccgttcacagtgttttatgttaaatgaatctcttgagtttttattttctgaatatagtaacataatatacagtcttctattttcaaagtcaatactaattttttccgctggttttcttatcacctatttaagacattttgactgaccatgtttatattcatatgcggggtgagccggcccctaatatagcgtaatcagcactttatgtatattgttcaaacagaaattccgacgaaaggttttctacgatatatggactgagcggcaaaaagttagcagaaatatgaaaggttttactcttatgctggtatcccagcttagtaactgcatatcatttctaatcgttcaactccaatgactccacaaggttctatacccggaagtcatattccatttattaaagctattgacatgaaaccaattccacaaattaaactcgtggagaacactagttggcgtaacacgaaacagtatagaagcatttgtggcgttacagctagtgtttttgagtgtttaaaggagattttcaggatacaaataacaataacgagcaacatcaggtgtagaaagttgaataaaaaacctatatttttacaaaaattgataataaaaggttgatatggtacgggtttcatactttaagatgatgatgtgtcttcactgaatactaaataaacatttccaggaggcgtttcctatgcagtctagcacatcatttaatagcccagcttaccttgaaacaaatggagtaatgaaaatcgctgatataacttatagtgataacgaatggctgaacttcgacattggaggagaaggaatttttaagagatcaggttcttatttagttccatctcttccagtagaatttcattgtcatggaatcggtcactatgattttagcaatttagatcaattagatattgaaaagatcaatacactagctgaaatagaagggattttctgtgtaccctctatttttcttcctcataatcaattagatcaatttgcagcctttatgaaagagttccatacacaaaagagaaagggacgttaccgtaatattttaggtatttcactagaaggaccattattggccagctttgtaggcacaccggaaaaagggaattgggcacccttaaaagaagaatgggaaaagatcgcttcttgcggagaatacggtcttatttatactgtactgtccccagatgctatgactgaaaactcctatctaaagaaatatatcaccgaagaacatccgagtttagaatggattgtagatacacttgtggaggctggagtaaaaccggcgctgggtcacttccaaaaagcatacccggaggaaacctctgaacttataatgaaagttatagatacagcgcaaaaacgcagcaattacactggatcagatgccgttttaacagatcatttgtttaatgatatgccgaacaattttaaacacacctggagaacaccccaagaaagagtacatagattagaggggttaaaagatgctcggttagataaatggaacatagataatataaacacacttgtcggagaagttcccggtactttgatgagagccgcgaaagaaggtctattaaccatttgtatgaattttaatagtgaacatgtagacttagaagttgcacggcgggttgtagaacttgttggctctaagggtattatagcaatgacagatcgcattgacacagattccatgtgcggccaatcactggagaaaattgaagggaataatctgtggtatcaaggaaaagggtatgtagcagcagggtcttacacaattgatcggcttatgcataatattcgtgctataggttttaatgagaaagttgtatggaatatgacatcatttgtaccattaaaagcttgtcacttcctaaatgaacttgaaaacctttccttgaagcccttcagttttatagatgaaacgaaaaaaagaactcatttcaaagcgcctgccccagaactgattctgcgctaagcaaaaaagaccaccataaagtggtctttttaagttgactttcttttaataagttttaggttcaacttatttatattggagacatctttgttattcattaagttatataataaatttgctgctgtttgtcccaactctttaataggttgatgtatcgttgaaagttctattaccttagatatcggctgattatcaaatcctataaccgccagttcttcaggtattcgtattccctgtcttttcgcttcataaatgatccccgccgcaacataatcacttcctacaaccattgccgcaggacgaggtgacttatttagcaataattttgctatttctataccattctcaatagtgtactgttcctcaaagtaccaattatcactccatttcaatccgtattcattttgaaagtgaaaaaatgatttttttctgcttatgccaacaccgctcttaggatttcctatacacagaccaatggattgatgtcctcgatttcgcagatgatcaattgccattttaattcctgactcatgattaataaatatatgtgcaacctgtttgcttgcagaagcttcacaggaaacaatattgccaaactcagatatctcgtcgagtacgtgaggggggcttacacaggatcccaaaataagaccgtcaatcagtttgtatttcaatctgttaaaaaactccatttcttgttcaggatcgttatttgattggtgcacaagtaaactgtaattatgtttattacactcttcgcctattccggcaatcagtttactgaaaaacggatggttgattttaggaacaatgactccgaatacatttgtcttccccctgaataggttaatcgcgttgaaatttggtacataatttaattccttcatagcttttaacacagcgtcccgcttctcaggttttacataaggatgattgttgagaactctggaaactgttgtccgagaaacgttcgctttctttgctatctctgtaatgtttgtcattactgttactccttcttagacagcgttatcaggattttacactgaacaacacaagggaaaataagcatttaatgaattgttttatcatggcctgcatgaatatgtgcgccttcctgtcccacactataaatagaacgaggcttccccatcttgtgtaatagtttgtcaaataaacctactaatatccccagacatagcaacacaatgatggtccctatcccaatcggcccctgaagaatgattgcaagcacaaaagctaaagcttcccctatcgtctttgtaatattaataccccaacctgtgcgttcagtaatagccaacattaattcatcattcggtatcgaaggaaaagatgctcttaaataaatagcgattcccatagccaatatacacaaccctatcaaaaataaactccattgaagaatgacagcatctgtttttaagaacgaaagaacctttaggtttaaaaggtcaacaaaacttccaataataaaaatcggaataaaaccggctagattaggaaaccgcatttttatgaggctgtttataaagataaggattcctccgacaatgaaaacccatgacccgattgtaaggccaatgagttctgataaagccacgtttagagcatcccagggggcaattccggtattagatttaatcatacatacaacccccacggataaaataaacaatccgacaatatagattaaacaccttttcacaaaatggctcatggctgtatactccgcggtttagggtcttcttctttcgtcagaatgtaatgatcaaaagcataagatacaccacactcatcattcgataacgttttaaaagcagccaattgaataagcttcttatctgcatttcccatggctatccctattcctgctgcatgaaacataggcagatcatttaaattatcacctattgcgattgcattccgcgcatccgttccataatgttcacaaagtttatttaatgacgctcctttatctactcctgcacttgtgatttcaagattgaatgctcctgaactcgttacggcacactccttcagttgtccaaaatattctttagctttttttaattttctttggtttggcgaaacgatcatacattttatgacataccgataatcgatagggtcaattgtacccggtatttcctctaacccgtattgatggatttgagctttaatagaactccaaaatacttcttgattaaaatgaggttcttccattaccgtattgtaaagttctttttcaagctgctgaattccttgatttgatacgacaattttgtcagataagtaaagctgataatagatttcctctttatttaaccatgttatgataggttggattacatctgaatccataaaatgttcgaatattacctgatttcccacatcaatttgagcgccgtttgaagcaataatcggaaaatccaaatcatatttattgatgatgtgttttgcatcaaataaagctctccctgtagcgattgttacaagatgaccttgtttttgtccaagctttaaagctcttacatcttgttcttggatagttaagttctctgataacagcgtgccatctaagtcaattgcaattactttcatgtgaatttcctcctcagagtttaaaaatcattgaaagtataatgtatggtacgcgtttcagagcaattagattattatattaatttgaagtttttctccagaagctgattagacctgtgcttctcaagtgttctcctgcttaatgatccttctcttttgctcaatccagttaataaagaactgactgctaatggcggaacactaatttgaagaaattcatctggaatttcaagcgctggcaactcactagaaaccggactgtagcaggacagctttccatcatgagtttgacttatggccggcgacttgggcaccggcactttccagagaacgatcactttttgtgaaaatcggatgtatgaagtgtcattgaggcggtgtccccgatatacttgtctcttttctttcatttgcggtaaagaaagcaaaacctgattcccttatgccagaacttgctttatcataaaagtatgcgtttacattcgagtagggaggttatagcatgacccctgtgaattcaagcagcatcgggaagattcaggcggccagcaaaggtttgtcgccaaaattaagagcgattgcagaccatatcgtgaaggaaccgaaagacgtgattcacctttccatcattcagctggcggaaaaaacgaaaagctctgaagcgacgattttcaggctgtgcaaacggctcggtttttccggctatcaggatttaaaaatcgcgcttgctcaggagatcgttcaggagccggtgcagcacattcatgaagaaatgaaccccgacgacgatatcgaagtcatcatccggaaagttttccgcacaaacatttccggtctgaccgatacctttcatttattagatccggccgacgttgaaaaagcggtagaaatgatccaccgcgcggacagaattgaattttacggaaacggcggttccgggctgatcgccactgacgcatatcataaatttatgcgtacgggtataaattgcatcgcgcacacggattctcactttcaggcgatgtcagcgggtcttctcggtcccgaaagcgcagtcatcggcatttctcattcgggaagcaacaaggacgtgctcgacgcggtgaaaacggccaaatcgctcggcgccggcacgatcggcattacaagctaccaaaagtcgccgctcacccagatttccgacgtggtgctgtatacatcaacaagggagacggctttcagaacggaagcaatgtccgcaaggcttgcccagctgtcggtcattgatacactgtatttcgccacggcccggctgcggcaggagaaaacgctcgccaacttgcagcaaatcagaaaaatgatcgcgcacaaacgtttgtaatatttatttttcaaaagagagaatgccgatacagcgggaattgaggcaattttatgaaaaaaattttcttcttcatcgttgatttataaaaaaattattcctataattgactttgtaagggcatacattattaatctatcttattattcaatcagattaggcgggatatattatgaaggaaacccaagctgttatcggtctggatatcggcacgaccagtacgaaagccgttctgttcggaccaagaggcaaagtattagccaagcattcggttcactatgatttaatacagccaaagccggcatgggccgagcaggatcctgagcacattctggaagcggttatcggaagcatcaggggcgccgtcacaaaggccggactgagccctgacaatctgcttgcaatcggcatcagcaccgccatgcactcattgatagctgtcgatcaaaacggcggcctgctgaccaaaagcatcatttgggcggacaaccgcagcgccgagcaatcaaaacggattttaaaagagatgaacggttttgatatttataaaagaacgggtacgccgattcacccgatgtctccgctttccaaaattgtgtggatgaaagaacaggacaaggagacattcgcgaaaaccgccaaattcatcagtattaaagaatatattctgcacgagtttttcgggacttatgtcgtcgattattcgatcgcttcggcaacagggctgttccgtttagatacgctttcctgggatgaagaagcgctccggattgccggaatccgggaagatcagctgtcggacatcgtgccgaccactcatcagctgcgcggccttgcgccggaaatcgctgcacggatgggcattcatgcggatacaccgtttattatcggcgcaaatgacggcgtgctcgccaaccttggagtcggcgcgatcggcaaaggcgaagtggccgttacgatcggaacaagcggagccgtgcgttcggtgacggatgcgccgattacggatgaaaaagcgcggacattctgttacgcgctgactgacaagcattgggtcatcggaggcccgacgaataacggaggcattatgctgcgctggcttcgagacgaattcgcttctccggaagtcgaaacggcgaagcggctcggcattgatccgtatgatttaatgattgatatcgctgataaagtgcccgcaggctctgagggattgctgtttctgccgtttttatcaggggagcgcgcgccgttttggaatccgaatgcccgcggaacgtttttcggcatcagcctccgccataaacgggagcattttatcagagcggtgctggaaggcgtcatcatgagcgtcttttcaatcggtgtcgcactgagagatttggcgggccccgcaaaagacgtgcgggcttcgggaggatttgcgagatcgccgctgtggaggcagattttgtccgatacgatgggacgggaagtcctcgttccggaaagttacgaagcctcggcgctcggagcggccgttctcgctttgcacagccttggcgaaatggaacggatcgaggatgttcaggactggatcagaatttctcaccgccatgaaccgaacgtcaaaaacagcgaaacatatattgagctgttttacttatacgagcggctgtatgacaagctcaaagatgaatttgacgtcatcagtgaatttcagctcaaacaaagccgttaattcttctttgaaagggtgaaaaggtcatgttactgtttattgtcattgccgctattatcgttttactcttattgattacggtcgctaaattaaatccgtttatcagtcttttgattacatccatccttgtcggtttcgcaacgggcatgaatctgccggacattatcgcttcgatgaaaaccgggctcggcaatacgctgtcgctgcttgcgatcgtgctggccctcgggacgatgctcggaaaaatgatggctgaatcaggcggtgcggagcgtatcgcccacaccctgatcggccgcttcggcaaaaagaaagtgcattgggcgatgatggccgtcgcttttattgtcggcatcccggtctttttccaggtcggcttcgtcctgctcgtgccgcttttgtttacgattgcgattgaaaccggggtttcattagtgacgatcgggattccgctccttgcgggactttccgtcgtgcacggattggttccgccccacccggcggcgatggcggctgtcggcatttatcacgccaatgtcggaaaaacgattttgttttctttaatcgttgggattccgactgccatcatcgcggggccgctttacggaaaatggattggtaggcgcattcataaacccgttcccgaactgttgaaaaaacaatttattgaacagaatgaaaaacgcaagcttccgggattcgcaaatacattgtttacgatattggtaccggtgatcctgatgcttatggcaacgcttgccgaaattgcgcttccggaaaaaagcacgctctatgaaacttttaaatttattggcgaccctgtcacggcgcttttgatcgccacggtttactcctttttcagccttggtttttatcagggctttgacagagaaagcattttaaaattcagcaatgactgtctgggaccgattgcttccattctgcttgtgatcggagccggcggcgcttttaacaacgtcctgattgattcaggcgtcggcacgtatatcgctgacatggcgaaacactcaagcttctctcccgttcttttaagctggacgatcgcggcggtcatccgtgtcgccacaggttcagcgactgtcgccatgatgacggcggccggcattgttgcaccgattgcatctgtcatgccgggcgtcagcagtgagcttctcgtattggcaacgggagcgggctctttgattctttcacatgtcaatgactccggtttctggctcattaaagagtatttcggaatgacggtcaaagaaacattcctgacatggacggcgatggaaacgattatttctgtcagtgcaatctgttttatcatgatcattaacgcgtttatataaaaacaaaccccggccgcaaaccggggtttgtttttttatcggtcattcacgaggatataagcggctttaacgggtccgtggacgccgacaaccaaatccatttcgatatcggccgagttgctcggcccagtaatatagttaatgcaggaaggaacggtgacgccgtctctgatctgctgtttcaatatatcgctggcctgtgtcattctcggcacaatggaagatttcgggatgattgcgatataggtggtcggaagcaggctgacagaacggccggcatgctctgacgcatacaaaacgacggtggctgattccgcaagcgtgatctcgctgaatgtaatgcccacattcgcttgttccgctttttcaatatttttcgctccttgttccgcgtcccattcccaaacgggaatcccttcgtccggccactcttctgtcataagggtctgcaagccgtacgtttcaaaccggctgtccttcggaatgatgacaggccctccttcaaagcggttcacctgcgtgcgcaaagcgtcgtaaagcccggctgcatccgtttcgatcagttcggtatgaatgttgacgcagtggtctttcagcatcgtgacaagatcgtcttccgtacagcccgcatgcgtttgatattgaggctgatacttccattcaggcagggacacgcctgatttcctgcgctctctgcccagacgttcggcgatccggtttaaaaaggattcctgatgtgtaaccgtccctttcatcatcattcttcccccttttgtttttcccggtctttaaaccaatctctgaatctcgatttatgcggcgccgggaagtcccgtattgccgtccattcttttaacggccccggcccttttgatattttgtcatcttccgtaaacggcgtcatggcggcaggcgcccatttcgatcccattttataaagggacggggatgacgagccgagcccgaaggctttcatcgccagtttttcgctgatcggcgctttgccctctttttccacgatgttctgccgatgcttgagcagcagctcgtgcagcggaattttaacgggacatgcttccgtacaggccgcgcataaggaagatgcgtacgggagctccttgtattcgtcatatccgccgagaagaggcgataagacggcgccgatcggacccgaatagatggacccgtacgagtgtccgccgacatgccggtacacgggacagacgttgatgcaggcggcgcagcggatacattgcagcaccgattgaaattccgtgccgagtatgcgggaacgcccgttgtccacaaccacaaggtggaattcctcaggcccgtccgcttctccttgctgccggggtcccgtcagcgccgtaatgtaacttgtaagccgctggccgacggcgcttctcgtcagcatgctgacaagcacttcaaactcagaaaatgacggaacgatccgctccattcccattacggtgatctgcgtcttcggcagcgcggacacaaggcggccgtttccttcgttcgtcacgagactgaccgatccggtatccgcgatcgcaaagttgcagcctgtaatgccgacatccgcttcgagaaattttttccggagaacgctgcgcgcgtgcatgacgagctcttccggtttttccgtctgtttgtattcgagtctctctttaaacacgtcacggatctgctctttgtttttgtgaagagcgggagcaacgatatgtgacggcggatcgtgatcgtcaatctggagaatgtattcgccgagatccgtttctgtgacttcacagccctcttcctcaagcacttcgttcatattgatttcttctgtcaccatggatttggattttacgatttttttagcgtttttctgccggatgacatcgcggatataggaggacgcttcttccgccgtttcggcgaaaaagacatgtccgcctctgttggcgacgttttcggcgagctgttccaaatagaaatcaagattgtccagcacatgctgtctgatttcttccgcatgggaacgccaatcctcccagtttcccaattcttcggccgcctgaagccttcttgtcctgagccgttcctgcgctccggagacggctcctctcataaactcattatctattccttctgatacccgctctttaaaagcggcggtaccgattttcatcgccatgattttccccccttgttgtttctcgtgttatctgctgttcagcacttcggcgatgtgcatgactctgacgtttttatccttacggtcaagacgcccgccgatattcatcagacatccgcaatccgctccgatcagcacctcggcctccgtgtcttccacgcaggcgaccttctcatccaccatttgttcagagatttgcgccattttcacagaaaacgttcctccgaatccgcagcattggtgttttccgggaagcgcggtcagctcgagccccttgacatggcgcaaaagcttcatcggctcctccgacacgccgagcagcctcgtcatatggcacgatgtatggactgtcgcttttttatgcagcaccgccccgacatcctccaccccgagaacgttgacgataaaatccgttaactcatatgttttgtccgcaagctgctgcgcttttgccgcccacttcggatcgtcctgaaacagatgcggatattcacggaacatcgtcgtacaggaacctgacggactgacaacgtactccgcttcttcaaacgcggcaatcatccgcttcatcgcttttttcgcatccgtcacatacccgctgttgtatgcgggctgcccgcagcaaatctgcccctcgggaaaatccacctcacacccgagccgttccagcacctcaaccgtcgcctttccgacattggtctggaacatatccacaaggcacgtgacaaataatgagactttcatgatgaacccctctttcatcctcaatatgtgatccggtcatctgatgacctgtttttgggaaagctctatgaatatcctacactattctgaatatggattggaaggtttttctgaaaaatcctttcgtccgatgcgctgaaggggacaaaaaaaagagaagcccgaaagctcctcaagctgctctacatcccgttttccagcagacgtcccagtttttgcacaccctcttttatcgcggctttaccggcataactgaacgacaggcgaagatattccgcaccgtcttcctgatgcagaaaaaaatatttaccgggtacataggaaacgccgtgagacagagccctctccagcattgcggatgtatccgctcccggcactttcacccatacaaagtaaccgccttcaggcacgtgccaggatgcggattccggaagatatcgagctgatgcggcgagcaaaacgtcacgtttgctttgatatgcttcccgcaagacggcgagccgtttttcaacattcgtttgttccagatagacggcggtcaccgcttgggaaaacgggtggcctaagtctttttttaaccatgacaatgccgtgatgaatgcagcgttccctgcaatccagccgatcctcatacccggggcgatgacttttgataatgaaccggcgtacagcacccggccgttttgacccatggctttcaagggcggcggaatatcggtgaatccgagctctccgtatgcatcatcctccaagatgagaaaatcatacgtttcggcaagctgaagcaggcgggttctccgcttcgctgacattacggttcccgcaggattctgaaaagcgggtatcgtgtagagaagacggggaagcagaagcccttttcgttttctttcctcaagcatgaacgctaatgtttctgtttgcaggccctcttgatctgtcggaacgctcatgatatgcggtgtgtaatttttaaaaatctcgagcgcttccatgtagaccggagcttcaacggcagcggcggtttgttcatcgaggaaaacccgtgcagccagatctatcgcctgacaggcgcctgacgtcacgagcagctcatcgtcccgacagtgaatgccgcggatggctacccgttcttgaatctgcttttttaatacggccgtcctcgggcttcccatataatgcagcggcagatcgcgctcctcatccagaaggcgggcggcggcttctttcagctccttatcaggaacgagtgcgggatcgggatagccggaatgcagggggatgcacgctttcggaactgccggcatccattccccgggaggatcgtttgtcagagctttctttacatggtcagaaaaaaaagattcggcctgcatgtgatgttatcccctttcacaagtcagcttctatacattttcttcaaaataagcccccagcacttcttccacattcgtcaggtgcgcggtcatcgcggcttccgcttcatccgcgtctttggcggcgacggcgctgtaaatgcgttcatgctcttcatacaatcgctgcacgctcgttcgtttagaaaacagccaaatttttctcgtttctctcattgtttccaaaaggagcgcggagacatgattcatgagatgcttgagcagcccgttttgtgatgcttccgccagcgccatgtgaaaggagaaatccgctttttcgcccaattcttcgtctccgtcaatatctttcatctccaggagagcttggcggattttttgtaaatcgtcttcggtgcgtttttcagcggccatggcggcgacgccgagttcaagcagctttctgacttcgagcagctgtttgacgtcctcttttttcatcaagagggcggaagaaagcggctgggaaacatgagacggctcaaattctcttatgtatgtgccttctccctgcttcatgtcgacgagccccatcgctttcaaagccgacagcgcttctctgaccgccgagcggctgacctgaaaactctcagaaagcgcctgaacggaatcaagcttttcacccggcttaagctcgcccgcttttatcttctccagcaatgcgtcagcgacttcctcgtagatttttttcgttttaatttgtttatatttcaacgcgatcaccccgtcacttgtgaatcttgatgtttatcgtctattatacttcttttttcgcaccgccgacaggttcagacaatttgttcaagaaaagtattgtactttcaaaactttcaaaatataatgctaattaacccggtcatcagatgaccttatcataaaaagtaatcgcttacatgacataaggaggggttttttagggatgcaatggacacaggggtacgctcctttagggggaaatttgcttttatcggcagcttgcgcgctcgtgccgattatcttctttttttgggcgcttgcggtgaaacggatgaaggggtacatcgcggggcttttaacgttagccgtttcacttttaatcgctgtatttgtttacggcatgccggcggaaaaagcggtgatgtccgcttctcagggagcggtgtacgggctgcttccgatcggctggattatcgtcacatcggtctttctgtataaaatcaccgtgaaaacgggacagtttgagattatccggagttcggtgctctcaattacagatgaccggcgtttgcaggcgctgctcatcgccttttcatttggggcgtttttagaaggcgccgccggtttcggcgcacccgtcgcgatctcggccgctttgctcgtcggacttggttttcagccgctgtatgcagcgggaatttgcctgattgccaatacggcgcccgttgccttcggcgcgatcggcattccgattaccgccgtcgaaggtccgaccgggataccggcaatggaaatttcccaaatggtcggccggcagcttccgtttttatccgtctttattccgctttacttaatcattttgatgagcgggtttaaaaaggcttttgagatatggccggccattcttgtttccggcgtctcctttgcggccgtgcagtacgcaagctcgaattttttagggcctgagcttccggatgtgctgtcggcgcttgtttccatggccgcgctcgctgtgtttttgaaattttggaaaccgaaaacggcctttcgtttcgcggcagaacgggaatcagcagcggccgctgaccgggcgccgatcaagtacgggggcgccgcggtgtttaaagcgtggtctcctttccttcttctgacggccatgatatccgtttgggggattcccggcgtgaaggctgccttaaccggtcattacgaaggaacgtcaatgtggctttcctggctgaatgcagccgggcgtgcattgaccttcacgcctcccgtcccatttgtaaatcagcagattcttcaggcggacggcacgccgattgaagccgtgtacaaacttgagcttttcggttcagcggggacggcgattctgactgccgccgtcatctccaagttcgccctcggcatgtcgtggaagacatggggcgaagcgtttatagaaacggtgaaggaattaacgcttccggtcgtgaccattgtttctgttgtcggctttgcttatgtgacgaatgcttccggcatgagcacgacactcggtcttgcgcttgccatgacgggcgcgatgttcacctttttttcgccggtgctcggctggctcggcgtgtttattaccggctctgatacgtcggccaatctattgttcggcggattgcaaaaggtgacggcgctctctgtcgggatggacccggttctctccgttgccgccaattcatcaggcggtgtcaccggaaaaatgatttctccgcaatccattgcggttgcctgtgccgctgtcggtctggcgggcaaggaagccgaccttttccgttttacgattaagcacagtctgtttttgcttctgctcgtctgtctcattacatttttacagcatcatctgttttcatggatgatcccgtaacacggagaacctccccggggtttggctcggggaggtttcagctgtaccgttttctcgccgatgacggcggaatatttaattggtcacggtatttggcgacggtgcgccttgagattcggatgtcatattgttcatgcagcagatcggcaagcttttggtctgaaaaaggtttctttttatcttctttaccgaccaatgcctccagatgcgcttttacggcataattggaggcgccgccgtcccctgacgattcagctttcgccgagaaaaatgttttcatttcatacagtccgtacggcgtctgaacgtacttccctttgatggcccggctgatcgttgattcgtggagctccagcgtttccgccacctctcttaaggtcagcggctgcattccgctttttcctgtgagaaaaaaggattcctgccgttcagtcaggacgccgataattctcgtgatcgtttgttttctttgcgacaaagcccggttcagccagcgccattcctgatattttgccgacagataatttttcgtgtcacggcacccggcagctgacagcagcggctgataatgggtatgaagctggatatcaggaaacgaacggctgttgagccgcgcttgaatgatgccgtttttcactgtgatgaaaatatccggttccacgtaaaaacccggctcctcatgcgcataacggagccccggcctcggatcaagggcgctgatcatgtcagcgatgtcctgaatgtctttaagcggaatgcccgttttcagtgtaagcgctttccagttctttcttgcaaatagctcaaaataggcgtcggcaatccattccgcctgttcgttccgctcgggaagacggcggagctgaagaaggatgcattcctgcaaagaccgggcgccgattcccgcgggctcaagggattgaagctttttcagaaccgcttccgtctcctcttgtgaagcggatacatggtcggcggcagctggtatgtcctcttttaaatatccgtttgagtccaatgaatgtatcagataattgaaaatctttttctcatcatcggacagcttcatatctaaggcttgctgtttgagcgaatcctgcagcgttttgcgggtaagtctgatctgctggcttccgtcccgttctttcatcctgtttttacttgttttatggtaagatagtggcggcgtgtctgtttcctttcgttcaatcagagggttttccagtgagagctcatcaatatatccggccagttccgcggaattgtatccgagtaatgtgatagcctgtttaagctcttgcgttaattgaggctttaacatttgtgtttgctgaagtttgatatccatcatgctcactccccttttttcattgtacatgattggtttcataccgtatatacttattaaaaggagttgctttatagatgtcagaacttttttctgttccttattttattgaaaactttacacagcacattgaaatgaatccgaatgaagaccaaattcatgcgatgaacagctattaccgctccgtcgtctcaacccttgttcaggatcagctgacgaaaaactcggttgtgctcaaaagaattcagcatttggatgaggcgtacaacaaagtaaaacgcggagaaacaaaataaaccttccgctcattcaaagcggaaggttttccttcgtgccggcggtttccccgatcagacggacatccggcgcttcgtgcatccaggtgtaataatagttggcgtttttcccgtatgaattatcaatgacggtattcggtttcccgagaagcgaggacagaatgtggccgtgaagccttgacgtttccaccgattcgtacctgctgaaaaacaggaccgatttcttcgttaagaaatcggaatagcgtttccaaaaccgcgcaatcggcagcgggtttcccgcttttttattcaaaacattcagcgtttggaaaaaagcgattcccctgcggtcgcttgctgacagcacatcctgccagtcgcagcttttaacggaagaattgttttgcagcttcggattgatttccccatccgtgcggataaaatgaagcctgccgcgtgacggagccgctgacgccgccatcggatacagctgatgggccatgtcaggcataagcccgatatgattcgccgaaaagaagtgttttgcagtttcgtaggacacatgatctctcgtaaacaggtggagatccttgtgctccgcaaaaagcgccgatgtcttctcaagccgtgtctcatcctgataatagatggattgcggcaggatgacgatcctgttttccggaaaggatttgacgattttttccctgaacgtctgatagtacggatagagatccccgaaatttccgccaccctgacagacgatgatcgtctttttgtccgcccggcgcccgaatggaaaattgtcgggattccagcgctgtttcacgcggatgccgtgcgctttaaaaaacgcctccgtccctttcataatcaataaatcccctacatttccgtagaggggatagtcggcataaatgatgtcagattgcggcggtataacgctgagcagacccgtcagcgtctcttttaatcggctcataacatggcggctgtccatgttttctcccctttcgtttcaaacagttgtgcaagtgcgtcaatgacacgctgctgctcctcagaagacaagtcagacccggacggcagacagatgccccggctgaaaaggttctcagagacacgctcatgttcgctgtgaggataaaagacggaagatgagaaaagcggctgcgtatgcagcggtttccacagcggccgggcctcaatgttctgttccgcaagacaggcgacggcttcttccggcgtcacgccgttatcaagcgtcagagccgtcagccagcggtttgaaaccgttccttcaagctccggcatcatgcggatgcccggatacgtttccagcgcttcccgatacctgtgaaagatttctctcctcgcccgaacgcgatcttcgagcacttccagctgcgatatccccacgcccgcgagaatgttgctgagcctgtagttatacccgagctcgctgtgctggtaatgaacggcggcatctctcgcctgggacgcaagaaacctcgctttttcaatcgcggcttcatcgtcagacacgagcatgccgcctcccgatgttgtaatgattttgttgccgttaaaggaataaatgccgaaacggccgaacgtgccgctctgcctgcctttatatgttgatcctaaggactcggcagcgtcttcaatcagacagacgccgtatgcgtcacaaaggctcattaattcatccattttcgcgctttggccgtaaagattgacggcgatcaccgctttcgggagtctgccgcgccgctttgcatcccgcagcgcccgctccagcgcatcgggcgacatattccacgtctcccattccgaatcaataaaaacgggctcagcctgctcatacacaatcggattcgccgtggcgacaaacgtaaaggaaggacaaaatacaacgtctccttttttcacacccgcaagccgcagggcaagatggatggccgccgttcccgagcttacggccgccgcgcttttcactcccgcatattccgcgagccgcgcttcaaacgaattgacgagcggaccgagcggggcaatccaattggaacggaaggcttctgcgatgtattcctgttcttttccgctcatatgaggcggagacaaataaatccgtttgtttgtttgcatgaaatcatcctttttcattatggataggggagatgacgcgggccggaacgccgaccgccgtcacatggccgggaatccggctgatgaccgcagcccccgcgccgataacggaccaagggccgatgtcaagctgcggtatgacggacgcgccgattccgaggtgcgttccttccccgactttcactccgccggcaagcgccgcgcgcggtgaaagatggacgtaatctccgattgcattgtcatgatcggcaaccgcccccgtattgatgatgcaatgggcgccgatgtcagcgcccgcctgaatgacggcgcccgccatcacaaccgttccgtgtccgacggaagccgtttcactgacgattgccccggggtgaatgagtgcggcataatcgtcatcttcaagcccaagcgtttcagcgaactgctttctgacgccgttgcggccgatgcatatcgtgaatacggcctcggggacgagtttccgaagcatgggcacgtctttcgtccggcccgtatataaaccgttccgaacggcaaaaccgctgaatccgtcatccaatacgcccgcaagctccatatcggaacgggcctgcacgatttccttcacgacttttccgtgtccgccgtttccgatcagcacgacctttttcacgatgacatatctccgctgcctgtgaagcgctttgccgtcacatggccggcttgatgtatgccttctgacacgagaacttttttcactgttaaaagcagaatctttaagtcgagaagaaatgtgcggttgtcgacgtaccacacgtcgagcttgaatttttcctcccaagaaatcgcgtttctcccgttaatctgcgcccagcccgtaatccccggcttcacctcgtggcgccgcgcctgctccgccgtgtaaagcggcagataatccatcagcaaagggcgggggccgacaagactgatatctcctttgagcacattaaaaagctggggaagctcatcgatgctcagttttctgatcagccttcccgttttggtcagacggagatgatccggaagcagcacaccgttttcatcacgcgcatccgtcatcgttctgagtttatacaatgtaaacggacgaccgttatgccccggtctcgtctgtttgaacaataccggagacccgatggcgcatctgacggctgccatggcgaagagaaggatgacgctcgcgccgcacaataacaacatcgcggccgctatatcaaatacacgtttcgccttcaaatctgaacagctcctttcacttttcggcatttctgtaaagcaagccgcctttcttctttcgtacaaatgaagaaaaaagcgaatgcggcatagctcatgcatacggcaagccccgcggcgatcaggccggcccagctgtcaagcggtgaaaacagccggataccccggcagacagcccaggcaaatacggccgccgccaacgggccgaacatgcctttgtaaaacgcggttttctgaaaaccggtaatatgcgaaacatacagcggcgtgaagacggcatttttcaaaatgagagagactgcaccggcgatggtgatgccgtacagcccgagatgagccggaccgctgagaaccacggccaatacgacattcagtccgcctaagcataaagtaacgacggcgggcgttttttgtttattaaaagccgtccatacataaaaaagcggcatgacagagagactgaccgccaaatacgcggcgtgaatatataaaagcggcgccgtctgcacaaacgacgggcccagccaaatcgccagaaacggttcggcaagccctcctaataatgcggcgggaagcgcgagcagaagcccgttcatccgcacagccttattggcgtaagacaggagaccttccatatccccttttgagtaataggaagtcaaaaccggcgcaaacagggaagcaagcgtcccggcaagacttctgagcaggagcgggaattgaataatcgccgcatagacacccgcctcagacggccccagcacgaggttggccgtcatgaggtcaatctgcagaaacagcagcacgccgatctggttgacagagctccaggcaccggccgaaaacagcactttgctcgtctgtaatgacaaggttttacggctgaaagaaaaccacggaatcaatttcttaaagaagaaaaaagtcagcacggccgcacagacggcccccgctaatgccgaaagctggatctgccagattttcggcggcaggcacgtaaacagagcgagcacacacagcaccctgaccagcatttgcacggcctgaatggagcttgtgatataaagcttgttggcaaaaaacggccccgtcgcgaaacccgccataaaaaacgtcagcataaacagcacgctgccgatcacgatagagagcctcacatccgttaagaggccggccggcacattcataatcttgtcaataaaaaaagccgtcccggcgagcggcacagcgagtaatagagatatcacgactgacgcggctaaataattgcttacatacgcattggcctcgtccctgttccccctgtgggcggcgacggagaaaaacctcacaacgacagagctcagcgcaacggtaataatagagaaatagttaatgatattctgtgtcagatggacaaacccaaaagcctccacacctaatgttttcacaataaagggcgtcatccacactgataaaaacaccgatagtaaaaacgccgtcacattggcgccgaaattaatggcaaatttcatgctccttccgcactgcctttctctttcgatttccgttcgaaaaacgcatgcagaagaagaggaaggcgcattttgcacaggccgagcaccacgcgctcccccgccagcagctgtttatggcggcacggcgtcctgcgcaccgccgtttttaccatgtcatacgttaagattctgccgatgtgcgccgtaatctgatgtgacggctgcggggcggcgcatgcgttggcgatcagcatcggaatctgatgcttgcacaaatatgtatcgatatcgctccggcaggcgtccgtcagcccgttttcctcataaaaagccattttcgctttatattgcttttgcagttcgtgatctaagtggggcttaaacggtgtttctgtaagactttgcggattttcccggtagatatacagcccttcgtctatcactttgatacgcgcggcttggcggaacgctgccaaattaaacggagagtcttcggcaaaccggatatcttcatggaacaacagcccttgcaatgcttctctccggtatatatagcgccacacataccaaataaaccgatgttcgtgcgcacgggtcagcaatgcagtcatttcatccgctgtgaagacgcggcccggcggaatggacggcggcatatacgttcgtttcttagacggcgtttccttataatagccgcatccggcgatatccagccggttcttctccgcttcttcataaagccgctcgaacatcgtttccgtcacatagtcatcgccgtccgcaaaaccgatataacggccgcgggcggcttttattccggcattgcgggccgagctgaggccgccgttttctttatgaatcacccggattctcgcatcttctgcggcgaattgttcagcaatccggcctgaccgatccggtgaaccgtcattgacgaaaatgatttcgatgtctctcagcgtctgttttgttaaagaaaccgcgcattctttcataaaaggctctgtcttatacatcggcacgatcacgctcacaagcggcgcggtcattgagcatcaccgctgattttcgagcgcagcccggcaaaataaacactgcgcaaagaaccgccttcctcatgcttgccgctgagcagccggtttacggcagacgttacggcttcagggtctggacgttcaagcaatgtcatgttcggtatgtttttcaaccattgatagccttccatcaccttatgatcaaacgaacgaatgacgacacaaggcgttttcgtcagcgcacaaaaaatcatcccgtgaagcctgtcagtgacgacggcttccgcgcctttcagcgtattccaaagcgcctccagctccttttcacgcgtatggcggctgaccctccggccgaccgtcgtcgtaaaggaatacagctctccgtactcttttgccaaagcttcttttaccatcgttctgtcctcagccgtcagcgcactctccttatcctcccgtaaacagaggtagatcccttcccgcgggatgcgccgctcgcttttatccaaatataagaccatgtcaggctgtttgagcactgtttttccgggaaaatgacgcttcatccattgatacgtcgtctcatctctcgccattaacaaaaggtcgggatgcgcattgtacacttttcgggcgcgcttcagttccttccgtcccttttttgattcagaaaagtgagccgtcgccggaagctgaacgatccgatattgccggaatgtttttatgataaagcggcgcgtccattcctcataccggtacaaatcccccatgttcccgccgccgatgatgaataccatatcatcggggtggcgctttttgatcagcgcttttgcggatctgtatatatccttcatatccacctcgacaatgtcaaaatcgggatactcccgttcaagaaacgttttgcttgcgtaggcgatggcgtgatcgccgagattatcgtgggacgggagcagcgtcagaatgatcttttttcttgccgctgtaagccccgccccatccgctgccgttccgaaatgaaattgggacgggtatttgaccttaagcaacagccattccgcgagattgatttttaaagattgtatcgacatgtcttcaccctctgattttcattttgtactcgattgcccgctgatacgcggctgatgccagcgacacgaacggaatcagcttcagcttcgccaaaagcagaaggcatgagcgtttggcgtcaaacggcgccgttccggttttggaaaggctcaggcgaaacacgggatcagcgcatatccggctgatattcttccacttctcagaaaaccggccgccgttattccgcttccattcattcagcaggcagactgttccgtgctgaacgatgaaaaaatccagctcctgccggtattcctgtaagcagccgttttcacgcaaaaaagcctcgttcagccgatagagaacgagacctgagtcaaacagctttttctgatagctttgcacaatggaagtcaagtgaatccgataatgatagagcggctgatccacgtacgagaccgcacctgcgaaaacatgcgcccggaggctgaagtactgatcctccacgtgctccagctcatcacgaagcggaaagcgcagctgatgatgctcgatcatcgttcttttgtacagcttgttccatgaaaaaccgctgacccttccttcaaataaatctttcaggtacagttgtttcgggcgccccgcgtacgctgaagcgatcgttgaaacggcggttttccccgtatccgcaaattcggccgcatattcgcaaatcacgagatcagcctgatcagccttcgctttttcatacatgcgcaggcaataatcaggttcaacccagtcgtccgcatcaataaaagcgataaattcgccgcgcgccgcctcaatgcccttgttgcggaccgcgccgagcccccggttttgctgatgaatgacccggattctctcatcccgcttctgataggtttcaagaatcgccgggctttgatccgttgacccgtcattaacggccacgatttcgatattggcgagcgactgattgagcaatgaatctaagcatctttctaaataagtttccgtattatacacagcaattaataaactgaccgcgggtgtttccatataaacctccagtgtccattaccgggaaaaaatcgttctgtacggaagcacagacgaatcgaccggcataagcaagtaactgtaaagaaaataacagacaataatggcgatataaatcagcgcatttgatttttcatcaaaaattctcacaaaataagggatcaagatcatttggtacaggccgaaatatatattaaaccgggcgaaaataacatcctttgtcgccaaaagaccgaagagcaggccgagcagacagaaattcacgatgacatcaatgtcaggccagagcttccgcagccgctcccgatagcagaaagccaaaaacagcggcagaagcagcaccgcgatttttacgacgttcatcccgttcgtattggtcatcagccatttctcataatggccgtatgagctgttttccagcacgacgacaaacagcgaaatgaacttctgatacagaaacgtcataagaagaaacaatgccgacagtccgaaaatcgcgggcgaccaggctttttttctgacgagaaaataaaccggaatcataatcagcgctgaggaatgaaaaagcgaacacagcagcacgattgacatataacgcttccagcttccgctgatcacgtagcggactgcccaaaacaaaacggccgccaccatatactgcctgatcccgttaaaggaagcgtaatagtgatacgtgcccaaaaacaaaaacacactcagctcaaacggacggccgaactcaacgagcccctttaaaataaagctgcacgtcacgaccgccacggtgaaatacatgatttgcggatctttcgtgataaaattcatgagccagatgagagccgtaaaccccggatcaacggctgcttttttcgctccgaacccgaagatctcccaaatgcttccgtaatttcccgccagcttgtacatcagcgcgtacgtctgaaaatccgtcccgactctgtagcgcaaaccggagaccaatacgagcgaaagcagcggaacgatcatgacgagctgattcggccggtatccggtcgaaagcgattgatcacgcccgccgcacattttcgcgaaccatgaccaaatataaacaattcccatattgactacatatacaatcattcgttactgttcctttttccaattcatattgtaaagcttcataacagcccccgcattttctcccgcgtcatatccctgccgtctgagggtttctttaatgcgctccccgtcaggctttgccgcctctgctgcccgtaacaccgcggatgcccattgtccgggcggttctttgaggctgagccttttgaccagcccgagcccggcatcggcttcttccgttatgccgtctgatattacgcacggcaccccggaggcctgcgcttcaacgagcgtgacgggcagcccttcataaagagacggcatgacaaatacatccagcgttttcagcagggcatgaacgcggtcttctatgccgataaaacgcacatcatcatcaagccccagcttcgccgccagattttccatatcggtgcgaagcggaccgtctccggcgagaatcagctgtaagccgatgccccgctctttcatatcagcggccagccggagcagaaattcgtggtttttttcttctgtaaagcggccgatatggccgatcaccaaacggccgcctgcaatgccccgcttccttttttcagcttctgtgtccgcgcacccgccggcaaataagtcgagatcaatgccgttcggcaaaagatgcacgtctttttctttcccgaataagaaacggcccgcgtcttctccgcaggcgcacagtgccgtggcgtttgccgtgatcagccgtctgaaaacaaacagctgcatcccggcaagccgcgacgcccgcccccgccacgacgtactgtgcgaatggcagatccgcaccgggacgccggctaaacgagcggcaagcgcgatgaatcccgactgaaaatcggtatgggcgtgcacggcggcaaacgggcctttttcctgaatcacccgcttgacctgtttcacaaatgtaatcgggtttgtgctgccgatgctcggcacataaaaaagccgtccgccgagagcgagaatttcctcatcataagcgcacggatcgttcctatgggttaaaaaatcaaactgcaccttcgttctgtccatcttccggtacaaattcatcatcatcgtttctgcgccgcccctgttcatcccgctgaagatgtgcagcacccgcatcggtttgtcagtcatgttcggcaagcccttctttttggcggatgtccctgtttttatgataacggttcatgaccgcgggcggcgtaatggcgcggatgagcggttttgcgatatacgcgtaatgggaaagcggcagcttcagccgtctgcatgcctgaaaaacgaggaccgcgttatcaatggaatacgtaaacgatcttcttttaaacgcatcactgtcctctctgactttatacagcgtttcttggagattgtacccccggaaacccgcttcaaaaaagcgcagccacaaatcgatatcctccatccgccgcgtccgcctgactgaccggtagccgccaagcgctttgtacgcttcggcccgcatcataatggtgccgtggcagaatggtgtgcctttcgccataattcccggtttcggcacgggcggcaaaagccgggcgccccttacgccgaattcgtcaaatacgagcatccccgtgcctacgacttgatagtgggcgtgcttgtttaagaaagcggcctgtttttccagtctcctcgggttggagatgtcatcaccgtcctgcctggcgatataatcccccgttgcgtatgtcagacagcggttcagcgaagcggcaagccgttgatttgtctgattttgaatcagcgtaatccggtcgccgtaatgatccgcgtaacggcgcgcaatctgatacgttccgtcagttgacgcgtcatcacacataatcagttcccaattcttataagattggctcaggatggattcaatactctccgctaaagtctcttcgcaattataaattcccatgatgacggaaattttcggttgtgctcctgcattcatacgcttttctcctttttatccatataaccggcgtaaatgtgcgccatttcctttaccgtacgtgtttccgaaaaacattccgccgtcctgcgcccttcttgtcccattgcttttcgcagacacggggagcggtacagcttttcaatccgatcggcaaatgccgcgctgtccccggccggcacgagaaaaccgttcacaccgtcttcgatgatctcacggtgccccctgttgtccgcggcaacggccggcttttcggcagccattccttcaagcagattcatgccgagcccttcgcggatgcttgaggcgacagacagatcagcaagctgaatcagttcatgaatatcgcggcaaaaaccgtaaaaccgcacaatgtcagatacaccgagtgattcagccttttttctgtacggctcttccatcgcgccttctccggcaaatacgagtttcagctccgggatgcggttcttcagcagtgccgcagtctcaatgagaagtccctggtttttattgccgtttaattcagcgggatatacgagaataaattccccggcgccgaagccgtgtttttctctcagacgttcactctcttcccggctcacagggcgaaacctgtctgtattcacgccgatgccgtgtattttcttcgcgccgtaatctgtttttttcatttgcttggcccgttcgtaatcctcttcattaatcgtaatcagacaatccgtataagaagaaagaaatttttcgatcgggtaataaagaagccagtttttcagaggcgctccgtcgcagaagtgaaagccgtgcgcggtgtacagcacctttgtccctttttggcgcgcttgtctcgcagcaaggcgtgcgagcacgccgccgaccggcgtatggcagtgaatcatgtcgtagccgttgtcctgaatgagccgtttcagccgcctgtaaacagaaagattttcgggatgaaacggcgagcgccggatcggaatggaaaacttttcatcaacgaacggaagattcatattgccgcctgccgcgacgtgcacctcccagcccatatcctgaaaccattgaaaatacggaagatgaaaggctttaaaatgataatcgacagtggcgcagaataatacttttttcgtcatctttctgtcctcccatcacacgcctgcggccgcttcttcatgtactgattcgatcgcctcaaacagcctttttctcagctcttcttcaggcagacggctgaattcctccataaaacggatgagcacggcccaattcccgtccaccgctttcccgatatggattttcggaaaaatctgctccgtatgtacttcattatgattcagcaattcttcatacatcttttctcccgggcggatgccggagaattcgatgggaatctgttctgtcgtatagcctgataaatgaatcaggttttttgccagatcgacaattttgacgggttctcccatatccagaacgaaaatctgccgcccttttgcaagcgccccggcctgaatgacgagtcttgacgcttcgggaatcgtcataaaatatcttgtcatcgccgggtgcgtgacggtgacgggtccgcctttttcaatctgctttttgaaaatcggaatgacgctgccgcggcttccgagcacatttccgaaacggacggcggcgaatttggtgctgctgacctttccgaggttcatgatgaccatttccgcaaaccgtttcgtcgcgcccatgacattggccggattgaccgctttgtcagaagaaatcagcacgaatgtttccgttccgcacatgtcggcggcttcggcgacatttttcgtgccgataatgttgtttttaacggcttcttccggattatgttccattaacggcacatgtttatgggcagccgcatgatagacgacgtgcggctcgtattttttcatcaaagtaaagattttatctctgtcctgaatatcggcgatctccgcgtgaaagagcacctctttgccgaagcgtgcggacagctcggtatgtacggaatgaatgctgttctccccgtggccgagaaggacgatttcccgcggaagaaacgcgctgatctggcggcagatctcagaaccgattgagccgccggcgcctgtgaccagaatcgtttttcccttgatgctgtcagaaattttgctcgtatcaagggtgaccggctttctgccgagcagatcttcggcttttacatctctgatgtgtccggcagcctgcgttccgagcaggatctcatcaaattgcggcatgattttaatatgggcgcccgtctgcacacattctttgtataacgtctgaagctcatgggtgcaaagagacggaatggcaatgataatatggtggattctcagcctctgcaccgccggcataatgctttcttttccgccgatgacgggcaggcccatgatttcgagcttatgcttcgtctgatcatcatcaataaaagccacaggcatgattccgagatcgtttttctgggtaagctgacggacgagcagcgtcccccccgcacctgcgccgatgatcagcgccctggaagagtcattttgcttcctgccgatcgtttctttcagcacccgtgaaatcatccggcttcctccgatgaacaataactgaaccatccagctgacggccaacagccggaacaaaatcgtgtggaacaccccgtattggacggcggctgtcacagctgctgacagcgtgatccccttcattaaggcaagcagctcgcctattcccgtgtacgtccatacctgcttatactggtgaaacataaaagcgcatacatgatggctgatcagcatgctcacggcagtcagcagcaacgctccggagtcataaaagtgataagaatcctcaaaaaattgatatcctataacaacggaaagtaaaacgagatacgtatccaatgcaaaaatcattgaaagtcttctccggtaagtcaatctttcccctcctcatttatcggtttagctgatacggttttcgtaaaaacagacataacagctaagccgataacaatgcatcatcttaagataaaattgggcatttaacccgtcctcacaccccgccaccgacgaccagcatctaaggcggcgaaaaacgccgcccacagcagagccgagtgcctccgttgataaaggtaaggagacatcacctgcaccgctcaataagagtagtgctccgtttttttgattttctttttattcagcagcgcccccaaaagctttgcctttgactgctggagagcgtctctcgccttttggacggtatccattttcgtttttccgctcaagacgacgagaacgcttccatctgtctggttcgctaaaatctgtccgtccgccacagccaaaagcggaggtgaatcgaaaataaccagactgtaccggctgtacatctcctgaatcagctctcccatcgcctttgaagataaaagctcagccggattcggcggcgtcggcccgctcgttaagacgtaaaggttatcaatcagcgttttttgcaccgtttcgccgagggaagcgtttccgactaacacattcgtaaggccttgtacattttcaagctgataggtctcgtgtatcgtcggttttcgtaaatccgcatcgacgagcagcacctttttttcctgctgcgcaaataccgcggcaaggttggcggcgctgaatgattttccttctcccggaacggaagaagtgacgagaatagagcgcaaatgggtctgaacagaggagaactcaatatttgtccgaatggtgcggtattgttcagccaccaatgatttgtgatgtaaaacggatatttgagccagtccccttcttgatttcttttttctgaatcccaaacgcctcactccccgaaatgtttttcatcagaccgtgtctgctgatttttgatgtcatacacaacccctaaaacaggcaagtctgttttttcgctgagctgccgctcgcttttaacggtttcatcaagaaaatggagaaaaaacgcaagcgtcacacccgccatgagagccgcaccgaacgccatcatgatattcctgatgcgcgaaggcttgaccatcgggctttccgatgcttttgcctcagacaaaacaatgacgccttttatattcatcctgtcacggacttcttttttaaatgtcttcatcagcgtgttcgctatagcggcggcctgtttcggattctcgtcctgcaccgctacggtaatgatctctgaatcggtttcgctgcttgtcgtgatctttgcttttaaagcggatgccgtctcagaaagatgcagcgtctgcttcactttctcaagcacaaccgggcttttcattatcgtttgaaacgtattgttgtaatgaagattcagctgaacgtcgctgagattagaatttttttcaccgcttgtttcatgaatgagcacttgggtcgatgactgataaacgggcgaaatcacccggaattggatgtatcccgtcaccagcgttacaactgctgtcatgataaaaatcagtaaaaatctgtgtttaataatgtcaaataattctttaaaactcatattctcattcatgtaattacagcctcatccttattgcatcaggcttaaacgcccccttctgttaatgattggattataaaagaaaaggtcgaaatttgaaaatttcaaattaagccatttagttctttttaaagaacattatcatgattttcctcttatttactgcacttaccttataattttaaattttataaagaacgaaaaatttcttataatgaacaaaaaaatgccagtatacaggggagaattcagcacaatgattggaagaataattcgtttataccgcagaagaaaaggctactctattaatcagctagcagttgaagcaggtgtctctaaatcttatttaagcaagatagaacggggggttcactcaaatccgtccatccaatttctgaaaaaagtatccgccaccctgcaggtcgatctgacggagctttttgatgccgaaacgatgctgcatcacatgggaggcacggaagatgagtggcgcatccaccttgtgcaggccgtgcagtcgggcatgccgaaagaagaactgttcacctttacgaacaaactgactgaaaaacgcccggagcccgcaccctaccgcaacagaaaactgactgaatccaacattgaggaatggaaagcgctgatgcaggaagccaaagaactcggcttgtccgttcaggaagtcagatcatttttagaacggaagcgttactgatgatatgctgatgaaaaggcttttattcgcttcatgtcttcatctctgtttataatgaaaagaaaaaaggggatgaaatcatgacaaaacttaccgttcaaacccgctccggcgcactgaaaggaactgccggccgcggtgcccgcatatggaagggcataccgtacgcgaagccgcccgtcggagagctcagatttaaagcgccggagccgcccgcaccttgggacggcgtaaaacatgccgattcgttcggaccggtttgtccgcagccggatgatatgctgtctatatcgttttccggagatataccggctcaatctgaagattgcctttacctcaatgttttcgcccccgattcagagggcgaaaaaaagcctgtcatggtatggatacacggcggggcattttatttaggtgccggaagcgaaccgctttacgacggatctgcccttgccgctgacggagatgtcattgtagtcacactcaattacaggctcggaccgttaggctttttacatttgtcttctattcatgacgcgtattccgccaatatcgggatgctcgatcagatcgccgcgctgcgctgggtgaaggacaatatctccgaattcggaggagacccggataacgtcacgatatttggtgaatcggcaggcggcatgagcatcgctgcgcttatggcaatgtctgacgcaaaaggcctgtttcataaagccattttagaaagcggcgcctctcatacgatcccggcggacatggcaaaagacatcgcggcggcatttattcatgaagccggcactgatcaattgcaggagctttccgttaatgacctgcttaagactgcggataaagtgcggcgctcactagatcaaaacatttttcagcttttgtttcagcccgccatcgatccggccacattgcctgcggaaccggtgaaagccatagcagacggggccgcagaaggcatacctatgatcatcggaaccaatcgtgatgaagcatatttgtttttcacccctgatacagacattcattccgagaaaaagcagcaagattatttgcattatcacctcggagagaactgcaccgagcaagcagcagatttatatccgcattcattaaagggacaaatcgatatgatgacggatctgattttctggcggccggctgtcgctttcgcacaaggacagtcgcagcacgcaccggtctggatgtaccgctttgattggcatggcgaaacaccgccgtttcataaagccgttcacgctctggaattgccgtttgtgttcggaaactttgattctttgagaaagacgctgcaagaaccgctcggtgatgacgcagaacagctttccaaacaaatccaatccgcatggctcgcttttgcaaaaaccggaaacccgaacacctctcacttcaattggcctgaatatgataccgattcacgcgaaactttgcttttcaacacggataccgctgtcgaaagtgatcccgattcagcaaaacgccgcatcttgtttcaagcataaaaaacgccaggggagccggctcccttggcgtttcgttttcatcttacttcagacatcgcagaaaatccatttccgcattaccctgatatgttatattctaacccaatacgttaaccaaacattcataaaggagtttttatatggagaaatcaagtattatcggcacagctgccgttataatcggggcgcttatgaccttagtttcatttatcttcctgcgcgacactgatttctatgccgtgaggtggataggggttgttatcatggttgcagggttttcatgcgggccggcccacaccatttcaaaacataaaaacaaacatgaaaaagaaacccggtaacctttactgggtttctttcatacacttcattttatctcacttcataatgcaactccgcaaattgcttatagcgcctgacatcagtcagcttcagccctgtctcccggtctccgggtttgaacaaagaaattccgcggccgagcagaacgggggcgatctgaatgataaactcatcgacaagtttttcctccaaaaccgggtgcagcagctcactcccgccgacaatccaaatccgcttgccttcttggcgtttcaatgcttttataaaatcggcaggctcttcatgaataaaccgcacatgttcagtgcccccggtcaatgtccgcgaaaacacatagcattctttacctttgtacggaaattcctcaggcaataaaaccaatatgtcctcgtatgtttttctgcccatgatgatcgtatcgacagattcatagaaagcttcataatcggtgccgtcttcaccttcagttccgattaaccaatctaaagagtgattttcccgcgcaagatagccatctgcgctgacagctccgtaaaaaacgagctttctttgaccgctcataaaaatccctcccccttttttattataccttgaacatgcggatgaaatgaaaaatgatagcatcgggtaaaaacccccgttaccgggttttcgtttcttcctgctttggagatgctgttaatatgccgtctatccatcttccggtaatcggcataaagaaatggagaatgacccctcctaaacaaacggttaataacgttccgatgcctaccggaccttttagcatcacggccagtatgaaaaatatgaagtaaatgaccgttcttgaaaaaaagatgcttctcccggttaattcgcggacaattaacgttaaccgatcaaccgggatcggtgcgaaatttgtgtgcagataggttgcggttcctatccctatcacaactaaaccgattgcaaaacagcccgcttttccgtaccatggttcaggcgttatgattcggtgcagaaaaaaaagccacatatcaatcccgattcccgttataaacgccgtaatcatccctgtaaattccggtctttgtctttttaacattgaattacagcaaattaacaggaaagcgatgatgatttcccagcttcccacggtaagccctgcatggacggataatcccacaataagcgcatcaaaaggagacgttccaagatctgattgaatcgtgacagaaataccaaaggtcaagatcatgattcctaaaacataaaaaacatatttcactttatcgtcctcattttcttattttatgttgcaaatacaacaaaaatacggtatgtttactatacggtattttcattgcaaatacaacaaaaaatcagctgatatgataaatgaagaaaggagctgtattgaccatgagtattaaattaaaaaagtgcagccttaacgatataacagagctccgggagataagcattgaaacattcaatgatacatttaaggatcaaaattcaccagaaaatatgaaagcttatttggaaaatgcattccgctctgaacagctgaaaaaggaattatccaatctgtcttctcaattctattttgtttattatcacgatgaccttgcggggtatgtaaaagtcaacatgaacgaagcacaatcagaaaaaatgggtgaagattctcttgagattgagcgaatttatataagaaaaaaccaccagaaacacggactcggcaaatatctgctgaatgaagctgtgaaaatcgcaacagcacacaataaaaagaaaatctggctgggcgtatgggaaaaaaacgaaaatgcaatcgccttttatcaaaaaatggggtttgtccaaaccggagaacactctttttatatgggggatgataagcaagtcgactttatcatgaccaaaaccctgtcgtaaaaggatacaaaaaacccggccaagctgccgggttttttctcttattttaattttcccgcacggatatcatcggtcattccttcgtacggcgcttctgaaatcagtgcttcgttattgattcccgcattgttgagataggtaatatccgcaaactcgggaacaacatatttcgggtacgtttcatatttctcacgtgactctttcatcacgtcaatgtaatcattttggtagcacaccgtgatttccggatgctcatgcacccatttcgggaagaaaataattccgtgcatccgtttttcattcggcataaagtttaaggaaacgtctgtgcctgtcggttcagtccatgacactttgtatacgccttctgtcagcttgacgatattcacttcctggtcgcgcacccagcggccgcctaccattccgctatgaatccgatagtcgatcgtatgatcatttttaatatagatttcatactcccagccgttttcatacgtgtaaatcatatggcttccgataaagttttccatgttgactcactctccatcttattattgaacttcataaatatctaaccgaatgtcatccggcaatcggaccgcagccccgataaacagccggtcctgcagatgctgatatgcctcgctgcttgtttcaaacacaggcacagtacggaaatacacgtgctcgggatcaatgatgcggttcactgactcataaatgactttttttaaagaaggttcattcaagacgtatcacctcccgaggtattatgtttatttaaacatgtaactatttacacgtttaattgtaacgctgttaaaatggactgtcaaataatgagctgtttctgattatgttttccaatgttcaatgaaaaaagacaagggcggcaaatgccgaccccttgtctttttcgtttagtgtatgctcctatcaaaaaacgccagacgagcgtcttcttagtaatcacaatctttatctctgcattctttcttacttacagcgtctattgagtgccccatgatcttgtcattggccttatcataaataccatcgaatttattcgatgtatcatcgttgtaatagccaaatacctctatcccgcccattggatctgtttcgtatttatctttaaatgtaacgttatgtattccgtcgtagttcgctttgataaatttctccattcgttcttgagcaatctttatctcttcagcctgaacatttttatcattcatactcttcattataaaacctccggctgctattaagataatgaagataataatatattttttcatagaactcatcctttccatgagttatgatgaaactcgcggactagaaaaatggtggtgacatccggtgcattaattcatacaaaaacagacgctatttaggcgacttaaagtttttcttcaatgttcacagcggatcatataaaccggcaaacaagagaacttctttattttgcgtcttttagtattcacattctttttcctgacattcgggtttctcttctgcatcgactgacgaaactcctatttcagcattcgttttgtcataaagtccgaaaaattctttttccttattaccattcaagtaccccttcacggaaataccacccataggatttattttataatcgttaatgtatgtaatttgctttatatttttgtaattagcttttatatagctttccattttatttttcgcttggttaaaaagttcttgctctgcttcttttttatcatggtggtacttcatgtagatacttcctgacgctatagttattacaaatatcaggacaaccatgtatttcttcacagactcatcctttcttagattaaatttacatcaacctcagagtgttgtacatgtctaaaaaaacatcaatgtatcaaatatcagtgatcgagattacttttatataagcgttagttagactatcctaaaagtgtgcgaatttctacaaaagcttatagttagatctagatttaatgaagttatgaaggagaagggaattcaaagccagaaggaattggctgatttagttggttcaactgaggttacgataagcaggtttaaaacaaatacaagatatgatatcacaacactattcattattaaattagaggaagagcaatacaacaaaattagtccagctcgattgagcaggctaatttatcttgtacaaagcttatctttacattcttcttttggttcggcatcaaccgtatatgacaatatttctttattgcctgggtcatatagaccttcaaactctttttttccgttagtataacccttaacactaataccgcccattgggttaatatagtaatcctcagaaaaatcgatatctttcacatttttatagttcgttgttaaaaactttttcatatgattctgggcttcttcgaataatgcaatctctttttccttttgatcatactgatgcttcataaaaagtcccccaactgctacaattattaaaataaagataattatgtactttttcatttggaaatcaaccctttcctataaataactgtcgttcttaagtaaacgaaatgagcgaaaacttgatatgaatatactttcagcatgtcaaaagcaaagctaaccaattcagaattcatcgcgattgttgctgacaagttaagattggaacttaaagcgagtaaaatgctatctgacgtttttcctatcgctgagttgtcatgatatttgtacgcgtttactgttaatatcggggatacctcgacaaatgagacggtagaggcgattgatctcaggaataggtttgaactgtatgagaaacatatcacgaattttgtaagataattaaacaaaataaatacccactcatccctgaggtgggtattttacctttcttcggcattgaccactgaaatacctatctccttgttcgtcggatcatatataccggaaaattctttttctttattattatttatgtagcctgaaacttcaactccgcctgtcggatcgatattgtagtcttttgaaaaatgaacttcctgtacatttttatagtctttttttaagtaattcttcatgtgctcttgcgcctcaatcacaagtttttcttcgtttttatgtttatcatattgacgcttcacgaaaaaacctcccactgctataattataacaattaggataataatgtattttctcatgcgtatcatcctttcggaactattttacaatataagaaaggtgatgtatatatgccaaaaggaaaagaaataaccgtctctaatgtcacagataaagaatattaccgtttgagtcaagcagcttacaattataaaatgttagccctgcatatgaaatataaaactccttataaaataagtaagacgtcatattggtacgttgagaaagtgaagcaggattctgatacgggtcttgatgcctttgtattctcaaaaggcatcaagtccaaaaacggaaaatggacaaaatcaaaaaaccccgaaaacgtggtcgtcgcatttgcaggaaccgatatcggaaaagacccgatcaatgacggcgtaaaagcggacggcggcaatattgttttcggaaatgatccgaaaaaagaagtacattatattgtaaaaaaagacgcaaaggatacatcaaaaacactcggagcctatcacggaacgccctctcaagacgccatgctcacaaccggaaagtataagctgataacgaaaacatcgcaaatcgatcaagccgatcagctggtacgcagcgtaaagaaaaagtatgccggaacgtcaacgattatttcaacaaccggccattcactcggcggcgctgaggccgaatacagcgcggtgaataatgatgtgtatgccgtcgcgtttaacagtccttccgtcgtgaaactgcacgatgaggaaacacagaaagacatcaacagcggcatttacgatccttacatccggtcaattatcaatccggacgacatggtcggggcgggttattggaacgaatacgaccgccacaacgggaccacaatttacacgaaaaacccctcgctctcacagttcagccggaagcagcggcttgatgggaaattgagcgagcagatcggaaaaaatctcgcttatttcttcactactgtcattctgagaaatccggatacacacggcttaaacgaagcaaatttcgtgttcgatagaaacggaactatcgcaaatccgaacggagatgaattagtctttgacaaaaacctcggcgctcttctgccggccggtgcgatcggaagcggagacgcgataaaagtaacgccgacaaacgcaaagaagctggctgaaaaggtgcaggctatgactgaggatttgcggacgatgaaaaaagaagcgcagaacgcctatcaggagcacgatgaaaaaatcgccgagctgaaaacagaattctacggtcaagtcggacacggcttgtttgaccagcttcaagcacaggacgtgaccaataccattgaagatattgcgctatcttacgagaaaggcccgattttttacgacactcaggctgagcaggcgtttattgattctttgcaggcggcaatcacggacctagaagagatcggcggattcttacataaaatagcagacgaatttcagaaaaaagaccagatgctcgcaaactggttaagatgatagaggtggatacataatgccgacattagacgaacttttagaacacaaggacgacccgatgaagaaaaggctgcagcggcagatgctgaaaacagggatgacgcaggcagcggggacaaaactggagacagtgcgccgaacgctgaaaccgacattcgaactggatacgttgaaagatgaattatatgaagtgtattcagcactattgaacagctttgaaggtaaggcgcaaaaagctctcgcgcagcggatcagtgaaagtgccaagcttattgttaatgtggagaacgacggagaaactttcgttaatagctttaaaacgagataaaaagcccctctgcaaagcaagttaagtatgaaatgaacgaaaataataaagatgtgattatcgagtcattaaagcggaaagttaatcgactagagcatgaacaaagatttttgaaaccaattaaaagtagcgtagcagaagtctacaaaaatttctagttgacaaggtatttattatttaacaatcaagattgtttaggaatcttgtatattaaactcaaaagttatttaactaaagataagagggtataaaaatggataatgaaacagccaaaaatattagagaaagtttaacggctgattgtacgaagtgctttggactttgctgcacagcgcttaatattgtagcatcaagcgattttccaattaacaagccagcaggtgcaccttgtgttaatttacaatctgattatggttgtcaaattcacagcaacttacgagagaaaggttttaagggctgtacagtgtttgactgtttaggttctggacaagttgtttctcaaattacttttaaaggtcaaagttggcgagataatcctgaaattagagaaaaaatgttccgagtgtttccgatcatggaacaaatacatgaaatgattgcgtacacggcagaagccttgtcgtatgacattccccatgctttgtctgataaattgagtgtgcagttaaaagaattgcagaacttaacaaaactcgatgctgaagaattattatctcttgatctagtggtgtacagatttccattaaacaaattgctttcggaaaccagcgagtatattcgggaaagcttaatttcaaagttacctgacactaaaaatgccaagaattataattacgaaagagccgattggattggcaaaaaattaagaggtaaagatttaagggcgttagatttaaggggagcatatttaattgctgcagatatgaggaatgcagatttaagaggtgttgattttattggcgctgatttgcgtgatactgatttaaggggagcagacttatctacgagtatgtttttaactcaaatgcaaattaattcggctaaaggtgatgtaaagacaacattcccctctcatatacaacgaccttcccattggattaactaattttgttcagtttgagtattaaaggaaactttttgaagatggtcttactatcagtcttaggaaagcacatattagtcatgaataatatatgctttatgctttcctttatttttgaggatttttataatttaggtcttgataatactgtgccatccggtatctgtagcgtgtggagttcggggaatttagctttccgatataatagacgtaggctaggacgttctttctttcggatttatttccgctggatggcgttcttttttttgtttttaaatctttaacgtgtcgtttcgacttgcttttctgtattgctcgattacgatatcgtctacataatcgagatatatttctgtagaagcgaggtcagcgtgccccattattttttgtagcgtttctcagatagttaatcgcaaaggaatgtcgtaagctatgaaggctcggtcggcattccttttttaaatccgccatttccccgtacttcgcagctctcttccgcaagtgatctttcgcaatcttctccccgtactgattaacgaagacatgcgtaaatttaccgaaatactccgtcatttccgttagtaattgccgcaactcttccgcgacctgttcagtcatcggtaccattctgttcttacggttcttgttgacggcgcccggcagcataataacgaggttgtcaaagtcgatatcttccggcttgagtccttcaagcgagcgaagcccgcacttcagcgcaataaggaacgctacataatcgcgaaagcccggaaacgtatctttatcgatcattttaaagaaacgccgcacttgactatccgtgagcatttttattgtcttttcatcgacttgcagcttcgttactcttttcgctggattctcgtttagaagtccgcgcttagtcattcggctaaggatcgactttatgccgcctaaacggatatttatcgttactggcgaaagatcgcgtacgttgagcatcgttgtaatataagaccgcagatgatctttccgtgaggtccgtcacgttatcagacggcatgataccgactacctccgtgaatttggcccaatacttccgataatcattgatcgttctatcgcgatagttctccgtttcaaatagctcgtatacgatccctaacgcttcgtgaacggatttcgtcgctttgaagctctttactattccgtcagtctcgcgccgattcctgacgccttgcctacgttttaaaatcgccataacaaaaaacctcccggatttatttatccgtgaggttacgtttgctgaatcggactgtttcgttttaggagaagcgagctgaccgattaaagccgggcccgttctttaccggttcgcgcccttccggacacttttcgtacacttaacgcttaacggaccgtcggaaaacgttgatatgacggggttataacgtattggacgcgctcggagggattcgaacccccgacagacgtggtaccggaaaccaccgctctatccaactgagctacgagcgcacgttttttcaatcagatacctttatattataataaagaaacgcgcagaaagcaactcttttttgataatgcacaacaggattatgcagcgtcctcatgcagcataatcctgcatcgtttaacgtcattgattttcacaaaaaacttatttcaggcggactgcccccggctcggtacatttccacccactgcagaaaaagcggtaatcacccgtttcagcttcttttccaaatgtcctttaacgtccaataggtgaattcctcaacctttacggcgcctttctcagaaaacagctcaatccccaatctgccttcattcggatagatacggcttgtcatcgttgtttctccatgattggcgaatacttcaatcgaggatctgtcaataaagatacgcagcgccagcttgccgtttgtatccgtctgcacccttctcacaccgtctttcgctttccccatcttggtgcaatcaagtgtcagctttttatccgttagattgtatgtcagcacaagttcttcttcgtctaggccgcgaatcttaaaacctgccgtttcggcatcagaatcgtttacatcaaacacggctcggacttcaagcagatcttccgacgtctttgccaagtaactccctgaaaccgatcgtccggcacattcccgatattccattttccgcagctgcttggtttcttccacgggattcatcaaaagtttatgatcatcacgcaaagtcagttctcgcggcaaagtcagtgcaccgcaccatccgtccgcttttgtcggcatctcagattcccacatatccatccagccgatagcaattctgcgtcctttatcatctaataatgtttgcacggcgtaaaagtcatggccgtgatccagttctttaaaagcgccgtgtgtaaatttgtttgtttcatcatgatagtcaccgattaaatagccggtttgatgtaaattttgataggaatcaccgtccgcctcgatcccctggggcgaaatcagcaggacatgcttgccgcctaattcaaagaaatcaggacattcccacatatagccgagattaccgtcactttgggcgagaacacccgcgtattcccaatcacgcaaatcaggtgaacggtataaaacgacccgtccgacgttttcttttgaagagttgccgatgaccatataccaaacatcgcgatgcttccatactttcggatcgcggaaatgacgggcgctgtcttccggcggttccgcaataacagggttttcctgaagcttttcaaacacgattccatcttggctgacagcgatattttgagtttgatagaataggtctttctcttgatcaattatattatgtcctgtatagatgagggctaatcttccatgatcatcgaccgcgcttcccgaaaaacagccgctttggtcgaatgcatcgcccggagctaaggcaaccggcaggtgctcccaatgaatgagatctttactttttacatgtccccaatgcatcggcccccaatgctcatcatacggatgatgctgaaaaaagacgtggtattctcctttaaactgaataagcccgttcggatcattgatccaattcgcccggggcataatatggtaccccaatcgatatctttgtttcactttaccctcggcttccttcagagcttcttccgcctgctgaattctatccatttgtaacatcctctctatccgattttttgcagacgctggacacgcctgctgttttgtttcgggcccaataaagtaaatatggagatgacggtaaaaccgaagacgacgattcccatgatgagataggtttgacggaaccccgcactgtcatataatcctcccgcaagcggcgacagaatcgacgcgcctgcctgagatgcgaattgaaaaccgacgagataaaggacggacgacagacgcgtatcaaaattggcagccaaatatttaaaaacggcgatcagcataatcggcaattccagtgcgtggatgagtttcattgatgaaatgcctacaggctcaactgcaattccggacccgacgatgcggaaagccattaaaaaccccgctaaaatcaaactgtttttcgccccgaacttattgacgataaaaggcgcaagaaacatcatgccggcctccaaaaacacctggaatgaattaagatagccgaatacttggttacccgtcgacactgaaggaaacaaagacgcatagtagatcggaaactgctgatcatatacgccgtaaatgcaagtcaccccgataatgtacagcataaaaaaccagaaatctcttagtaaaaagagccgccccacgtcttttaaccggaccgaatccgctctgtttttctcatgatcggtcatttctattttcacagacatgataatggccgttaatatgacggctgaaacagacgcgatccagaagttgatattgggattgatattgaaaagctgccctgcaaaaaatgcagccgccgcccagcccagcgagccccacattcttgatctaccatactcgaaatcatacttacggctgaccttttcaatgtacgtttcaatcgcgcctatccctgccaaaaaagcggctcccaaatataagcctccgacaacggcgccaagaaagacgttgtattgtaaaagcggcccatagacgaagatataaaacggacccgtgaatatgagaagacagctgatcataaacaatatctttttcttcagccccaatttgtcagagataaaaccgtaaagaggctgcatgcagagagcaaatacggcgtttacagaaaagataatgcctgtcgctgatccgtttaaattgatttcctgccctaaccaaatcgcaaataaagaatagctggaagaccaagtaaaaaagaaaaagaagaaataagcactcagtttccaatacagactttttgagcttttcatttgcaccgctcctttaataggaccttttaatagccgttttagagccgcatacttccttcttcattttcatcacatacatgcgatctctgagtaagcgcttactttctatcgctgcttaattctttcactttattgccgccagccatctctccatacccgtcacttcccttcactccgtaaataaagcgctttcaaaaagaattgtatgtcaaccggttccatatgtcaatcggttgacatacaattttctgattattttaatcaaacaaaacgcaccctctttatatgaaaacagaaacacggaatgtccttgcacatgtcagcctgattctctaaaataagtgcgtgacggaaattgtaagccatttcagtaagcaggagggcacgggaatgaagcctaacattcatgatgttgcgaaaatagcgggagtttcatctacaaccgtttcgcgggtattaaataaccgcggctatatcagcgaaaaaacaaaagaaaaagtgtacaaggcgatggaagaaatcaattactttccaaacgatctggcccgctctttattccgaaaacgaaccaatttaatagggcttatcatcccaaactccggcaacccgtttttcggcgaactcgcctttcatattgaaagcatttgtacgtccatgggctacaaactgctgctttgcaacagtttacatcgaaaggataaggaagaaaaatatttggagatgctgataagaaaccaagtggacggcgtgatcgccgtgacttacaaccggggaattctcaattatcacaagcaaaatctgccgattgtcgccattgatcattacttatcggacacgattcccgtcgtcggctcagacaactatgacggcggaaaaaaggcggcagaactgctgattgaaaaagggtgccggcacattgtccatatcaacggcccgattgaactcgaaacaccggcaaacctcagaagaaaagcatacgaagacgtcatgcatgaacacagacggaagcctattacatatgaagtacccttttatcagcattaccatgacattatttcaacattattcgatgaacagcccgacaccgacggaatttttgccagcgatgatatcatggcggctgcagtgatgaccgaggccaaaaaacggggaatagacatcccgaatcaattaaaagtgatcggttatgacggcactgaaaccgttcaatcggttctgccggacttggcaaccatccagcagccgattgaattgatttccaaaacagccatcgagattttagcaaaagaaattgaaggcgaatttgatgatttgccgctggaaacgtatttgccggtacggcttttggaagggcggacaacgtagtcagacccttccaaaagccgtacgtagcgacgcgattgcggtctattttgagcgctccggccatatcattttctcaaggctccggcattgatcatcctcatttccactttgctgtttgaactttttgttttatgggaaaaatggtgttagaagaaaaggttggcattttggtcagcgttttgtttgacctttattgaccaaaaatgtatcatgtaaatacatacttacctaaaaggtgaaggaggagcattatgaatttaatacctacagtcattgaacaaacgaaccgcggagaaagagcttatgacatttactcccgtcttttgaaggaccgtattatcatgcttggatctgcgattgatgacaacgttgcgaactccatcgtgtcacagcttttattccttgaagcggaagaccctgaaaaagatatttccatttacattaacagccctggcggatcaatcactgccggtatggcaatctatgatacaatgcagttcattaaaccgaaagtatccacgatctgcatcggtatggccgcttctatgggagcatttttacttgcagccggagaaaaaggcaaacgttacgcgcttcctaacagtgaagttatgattcaccagccgcttggcggagcgcaaggacaggcgacagaaattgaaatcgcggcaaaacgcattctcttgcttcgcgacaaattaaacaaagtgcttgctgaacgtaccggccagccgcttgaagtcattgagcgcgatacagaccgcgacaacttcaaatcagctgatgaagccttagaatacggcttaatcgataaagtgctgacacgcaatacagaagaccagaagtaatgccaaaaaaacctgcaagagctgatgtctcttgcaggtttttttatgctttattcccattcaaaaaagtaatgaatgctttgacgacagataattctaacgctgaagaattatacataagccaagtatcgcgtatcacaggctcgttatttttataggatagcgccaatgtgtataattcatcagaaggctgaagacagatttccggcacaacagaataaccgagaccgtttttcaccatctctttacaggtttcctgcctgtctacctccatcgcaatgaaaggcggttcagtaaattggttattccaccatttttgaatcaaacttttcaaagaagcatcagtttgataataaatcatcggcaatttgggaaggtcctcactgttgatttcagtttttgaaataaggtacagccgctcttcatttagcagttgtttttccccttgccaatcataatttcccctcataatcccaaggtgtacccccgaatgatgaagcagatccatcaccttcgcactccatcccgtattgacgtggaattgaacagacggatactgatcagaaaaccgttttagaatcgccgggagcttatactgagcaaaattgcttgagactcctaatctgagaaccccgctgacttcatggctcatattgagcatatcatccttcactcttctgaattcctgcagcatctctttcgaataatcaaccagatgttcaccttctgaagtgaactccatccctttttttcttttataaaaaaggcgcactccgaattgtgcttccaggtttttgagccgataacttaacgccggctgtgtcatatataatcgctctgccgccttcgtcatatttttttcttcgaataatgtaatgagcacaatccaatccttttcatccatatgaaatcccccaaaatatttttctgctataaaatttcctcctattataaaagttttttattcaactttataaaaattatatgttttacttataatccttatttatcatacgatattttccaaagggaccggtacctttttatccacacaaaatgatgtaaggatgagacagcatggaaaaagttcctgtaaccgtcatgagaggcggcaccagcaaaggcgtttttattcatcaaaaagacatgccagacgatacaaacctatggagcgattttcttttagacattatggggagccctgacgagagacaaattgacggtctcggcggcggccattctctcacaagcaaggcagccattattaagaaatccgccagaaaggatgcagatgttgagtatacgtttgctcaggtcagtttgactgaccattttaccgacttcaaaggcaattgcggaaatatctcttctgccgtaggcccttatgctattgataaagggctcgttcaagctgaagagccggttacaaaagtcagaatgttaaatacaaacactcaaaaagtgatcgtagcagaagttgaagtcagaaatggaacatttcattaccagggggactgctctatccccggggttccaggtacagcttctcctatttatctttcatttcaccaggctgaaggagcggtgaccggtaagctgtttcccactggtcagcctattgatgttctcgatacaccgtatggaaatatctcggtctcgattattgattacgctaatccgcttgtctttgtaaaagcagaggccacggggcttaccggcttagaacttccggatgaatatactccggatatattggaaaagctcgaaatgatccgatcgattgcagccgagaaatgcagattcgctccgagacatgaggctgctgcaaaatcaccggccgtaccaaaactaacattaatctcatctccagcggattatatcgatacaaaagggataaagagacacgcagaagagatggatcttgtcattcgtatgatgtccatgcaaaaaccgcatcaagctttagccattacaggggcggtttgtacgactgccggcatgctattgcaggatacaatattatctgaattttcattctatggcagaacgattcgattgggacatccaagcggcattttagaaaccgaggcagatgttgatccggatggaacaacgattaaagtagtacgcacagcaagaaaaatctctgaaggctatgtgtttacaaagcaaagttacaacctgaatacgctgaatcacattggttaataccagtcttcagacaagtcaaagataaacggaggaatacgagatgatcaatgtaaatgcgtctaatcgattaaacagactgcctttttcaagggcccatcaagcagtgctcgttatcctttcattcgcttacttttttgattttatcgatttaaatacgttttcatatgcggcgccttcacttttaaaggaatggaacatttcgactcataccatcgcttttattacgtctgtctcctatttcggaatgtttatcggcgcctctgccggaggatggttttcagaccgtttcggaaggaaaaaaggtttaattctggttgtcacttttttctctttcttctccctcctctcttctctggcttggaacccagaaatactcggtgtttttagatttcttacgagtttaggtatcggcgccacaacgattgtggcaagtacgtatatcagcgaatttttcccatccgcaactaagggtaagtaccaggcaatctgtattacaatcggcatatgcggaattcctgcagccggctgggtggctaaattggtcgtgccgtccgcctcttacggctggcggtttatctttctattcggcgcggtcggtattttttttccgctgatcgccagaaaactggaagaatcaccgaaatggctggacacgaaaggaaaaagcgaacaagcacaccgcattctgcttgaactggaggcaaaagcagaaaaagaaaagggtgaactgcctgaaccagctccggctctgcgaagcagacaaaccgctgtaaaatccgtaccatatcggacgttatttcaaaagcctttggcaggaagaacttttgttttaatgacgatgtgggctgcttccacgattgcaattcaaggctttggcacatgggttcccacccttttggtaaaagaaggcgtatcaatggatgagtctatcgtatacgtcactctgggaacgatcggtgccccgctgggcgctctcattgcgtcgcaaatctctgaccgtgtggatcgaaagtgggccatttctgttttatcgttaattattatggcgcttggattcttttatggcatcaatcctttgccgatggtcattgtcatatgcggatttctcatgcatatgtttgagcgtactttcagttcgatcgcatatgcctatacgccggaattatatccggttgaagccagggcgtctggaaatggcctcacttacggcgtaggacgtcttgcgaatgtagccggtccctttgtcgtcagtttcctgtattcaggctacggatttttaagtgttttcttgttttttacaggctgctggtttctttgtgcactgacagtcggtatatttggaatcagttcaaaaaaacaaaagatgcagcaggatgatttcatatcggaggaaacattcgtgcaacaaaagttgtaaacgcatacagtctgcaaaccgcaaaacatccatctcctctgaggaaatggatgttcttctttcaaccccaacagcattctctttctcatcttattctcatacatatgtcttatcctgaagaaaggtgtgatacgtatgagaaagagaaaacgatttccagaaagaaaaggtattctataggcggagaattttccatcagaatagattagatgcaaccgccgaaacatatttcagacctctgacttacaattcccgccatttcttatctaaaatcgggtatgtataccgattcatctgctcaatcagctcatccggccgggaggaactgtgtatcagcttcaaatgagactcattcgaaaatccttcctgaatgctgtacttgaccatcttcatcatcggctcaaaatacccgttcacattgtacagtccgatcggtttttgatgaatgccgatttgcgcccagcatagcacttcaaataactcttcatatgttccgaagccgccgggcatggcaatgtacccatcggcaagttcactcattttcgctttccgctcatgcatgccgctgacttcaatcagctccgtcagattctgatgaacaacctctccgctgaacagcccgctcggcatgacgccgacagcttttccgccgcctgccattaacgcgtcggcgacggttcccatcagaccgacccgtgaaccgccgtaaacaaggccgattccctgctccgccatatattcacccagttcggccgctttgcgtttgtactcttcatttacccccgggtttgaccccgcaaatacacaaatggttttcattttttcatctccatatctatatatgtacatcaataaatcaaaatacactatatattgtcccatctctatatgataatatcaataagaatcatacaggacataaggagtgtttcacatgcagatggctgaagcagaacaatggacgaaagatttttatgaaaaacgaggatggacggcgtacgggccatttatcagaatcggttttttaatggaagaggcgggtgagctcgcccgggcggtaagagcatatgaaatcggcagagaccggccggatgaaaaagacgcgacccaggctgaacgcaggcaggagctgattgaagaaatgggtgacgtcctcggaaatctggccatccttgctgataagtacggcatcacgttagaagatgcgatgaaagcccatcaggaaaaactgatcaagcgctttgaaaccgaataaaaacacggcctgtccgctttttcatggacaggccgtatctgaatttatcccgttatctcgtcctgatgctcaaagaaatgctgtttcccgattttatgaaacagccccgtcttccggatgagctctctcggctgtgattgcaatccgacgatcatcaatctcccgttatgccgtttgatccggttcatcacattccccagcaccgcttctgcggaggtatccatgtaatgtacattattcatcagcagaataagcgtcttcggcttttcctgaagcctctccagcagcgatgtttccagtgaatcaattgaaccgaaaaacagcggcccttcaatggaatatgtgctgacggacgaatcatttttaaccgatttgacagcggcatgcggtgttttgatacgtgttgattcgctcatttttctgataaagaaaacaaaagcgagcacgagaccggcagaaacgccgatgattaaatcaaacagaaccgtcagcaaaaaggttgccgccagtacgaatgaatcagtgtttttcagccgcatcatattggcgacttccctccgctcactcatgttccaagccacaaccatcaataccggcgccatgcttgccagcggtacgtgaacggcaagcggggcgaagacgagcaggacgaggaggacggtgactccgtggacaacaccggaaatcggagaaactgcgccgtttttaatatttgttgcggtccgcgcaatcgctcccgttgccggtataccgccgaaaagcggcgctgccatattggcgatgccctgcccgacaagctccctattgctgtcatgccttgatcctttcatattgtccgcgaccatcgccgataatatggactcaagtccgccgagaagcgcaatgatcagagccgacggaaacatcatgatcatgttatcgattgagaaatcaggaagctggaaagccggaagctgccgcgggatttccccgtaagcagaaccgattgtcgccattttgtcaggaaaaaacacgaccgccgcggctgtagagacaagcagcgccacaagcgcgcccggaatcttcggcatcagcctggctgataacagcaaaatggccaaagcaattcccgcgatgaggatgctgtacaaattaaaggttccgagcttcttgccgatttccgcaatgttgaggataaagctttcatgcttttggatatcgcgcagaccgagaaaatgggcaatctgctccgagaaaatcagcaccgcgattccggccgtaaatccgacgatcaccggcttcggcacgaatttcataatctttccgagcttaaatacgccaaacaggacgagcatgacgcctgccataaaaccggctacgagtaaattctcaaaaccatactgcatcacaatggcaaataaaatgggaacaaacgcccccgtaggcccgccgatctgatatttagagccgcccaacagcgaaattagaattccggccacaataacggtgtaaagcccgtattccggaccgacccccgaggcgatggcaaaggccattcccagtggaatcgctacaattccgaccacaattcccgcgactaggtctttctgaaatttctgtaaattgtatccctgatatctgccggtaaattgcatcgtcagctgcatcctcctttgactgtttcataaccgtcaacgacaacatccaacgtccccgtccccggatcaatcaccagcccgtgcaccggcacttcttcaggcaagagcggatgatgcctgaccatattcacgctgtgggccacgctttcttcgacgctgtgaaagccggtcagccatgtttccaaatcgactcccgcatgctgcagaaggctgagacatttgtcttccacgccgcgctctttcgctttatttaatatggaagccgcatttaatcccgacattccgcactcgcggtgacctatgatgcagacttcctctgcctgcagttcataaacggcaaccaaaatgctccgcatgacacttccaaatgggtgagaaacaatggctcccgcgttttttatgattttggcatcgccgtttctgagtcccatcgcctgcggcagaagctccgtcagccttgtatccatgcaggatacgatgacaagcttttttttcgggaattttgtcgtttggtaaggttcatatttcctttcttggacaaactgctggttgtgctccaaaatgcttgataaagaaaccatttttctattcatctcccatccgattgtattgcaagccttcttacccagcttacagtaaggaattatagcacagaaaaaggcctcaaaagcgctttcaaaaaaagacacgataatttgactgtaaattcagattatgttcatttatatctttcaaaaataataaaatttatctttacaccaacctataaagcttttgaaaacagcggttccgctcattttgccttcagaaatataggcggattctgttattgtttggagaaatcaagcatgtacatttctttttctttcattttaagttcaaaagaaccagaaatttatcgtgatgcgtttgaatatttctcacgttaccgcttctcttatataataaaatagagaagaaagacaaaggaggagaagcccgttgaaaccctatgtattcatcgcgaaaccggtaccgccggaagtcgagcaaatgataggcgagcattgccgctatgacatctggaaagaagataccattccaaaagaggaactgtacgaaaaaatgaaagatgctgaagggctgctgacatccggaacggcgattgacagtgatttactggatcacgcgccgaagctgaaggtcgtcagcaataattctgtcggctatgataattttaatattgaagaaatgaaaagacggggggttgtcggcacgcatacgccgtacaccttagatgacactgtcgctgatctggctttttcattaatcctgtcttccgccagacgggttgccgaattggatcgattcgtccgcgccggcaaatggggaaccgttgaggaagaatctcttttcggtatggatgtccaccatcagacattaggaattatcggcatgggcagaatcggtgaacaagctgccaaacgggcaaaattcggcttcgatatggacgtgctgtattataatcgcagcagaaaaccggacgctgagaaggaactcggggttacatatgccgacttagatacactgctgaaaacatcagactttgtgctgttaattacgccgcttactgacgaaacgtatcatatgatgggagagcgggaatttaaattgatgaaagatacggcatgtttcgtcaatatttcccggggaaagacggttgatgagaaagcgctcatccgcgcattgcaggagggctggataaaaggcgccggtttagatgtgtttgaaaaagagccgatcgccgaagacaatccgctcctgcagctggaaaacgtcacattgcttccgcatatcgggtcagcaacggcaaaaatccgtttgaatatgttcaagcaagccgcacaaaacatgattgacgccgtatacggaaaaacgccgaaaaacctcacgaaggaatttcaatgagatgaaaaatcccggccgtttcagccggggtttattttttgctagatcaaaagaactatttttaaattctttctattcctttctctcgatgctgatacaatgaaaaggaatcagcttcacatgataaaaatgggaggtattgctttgaaaaaacgattatcgtggatttccgtttgtttgctggtgctgttctccgcggcggggatgctgttttccacggctgccaagacggatacatcttctcacaaggcgcacactgaagcacaggttatcaacacgtttgacggggttgcggattatcttcagacctatcataagcttcctgataattacattacaaagtcagaagcgcaggccctcggctgggttgcatcaaaggggaatcttgcagacgtcgctccggggaaaagcatcggcggagacatcttctcaaacagggaaggcaaactccctgccaaaagcggacggacgtggcgtgaagcggatattaactatacatcaggcttcagaaattcagaccggattctttactcaagcgactggctgatttataagacgacagatcattataaaacctttacaaaaatgagataaacacatacaaaaaacggcttccctgcggaggccgttttttttgcagagaacctgcgagcttcatataaaatgagcagtaaatttttcttcaaactctgatcggtctattctgctgttctccgccgtgccatcgtgtttttttattgttatattgcgttcagacagaaccatgtgcccttccggtgtccgcttagaagcaagcaggcgtttgttgaaaggagagcgttcatgttcaaagattgtttgtttcatagacttgaggtccttttcatcgatttcttcaagcgaaaatgcgtaacctgtctgccagccgtcccctttgttcatttcaagcaggtatgtcccgaattccgtctcttctatcctcacgcggaacgctccggccgctgataccgtctcgtctcccgacatcggcacaggctgcatggcgagattgaggccgaagcctgcatcagcgatgtactcattccccccggcggaaagaagtacggccgcatgtgtgccgggcagcgcccagccgtttttccagaccgttccgcggatcaatttgacatcaaatccggcatctttcaggatgaaataaagcagtccgttcaagtcataacaaaggccgccatgaggttccttcaccatgtgccgccacagtccttctttcgtgacgtcatattcttttttggacaaaaccgcgcgattttcaaacggaaaccgatatgcgagcgcctttaaaaactccggcaggttgctgaaatcgagggaatccttttcccagcctatcgtttgataacaatctttcagaaactcattcatcgttccgtcccccttacaaagtgtttacacttcttcctgcacataagcggacaacttttccagcgcttccttttcatcgtcgccttcagcgatcagagtgacttccgtccccgtgctgaccgccagactcattaatcccataatgcttttggcattcactttcttgccgtttttctcaagaaacacatctgatgcaaaacgatttgcctcctgtacaaacaatgcagcgggacgcgcctgcaaacccgtctttaaacgcacttccactttctcctgaaccataagatctccccttttctgtacggttatttcaaagtgatgctttgtcctgtacgcagctgttctgcgatttcatcgagctttctcagcctgtgattgatgccggatttgctgattttcccgcttgcaaccatttcccccagttctttcagcgtgacctcctgataatcaatccgcagctgcgcaatttcgcgaagcttttccgggagcgcttcaagaccgatccgttcatcaatgtatttaatattttccacctgtctgagagaagcaccgatggttttgtttaagtttgctgtttcacaattgacgaggcggttcactgagtttctcatgtctctgacaatccgcacatcttcaaaacgcagcagtgaattgtgagcgccgatgacattcagaaattcagtgattttttccgcctcttttaaatacgtaatatagccttttttccgttcaagcgttttgctgttcagatgaaattcattcagcagcgcgcataatgaatcgttatgttccttataaagcgagaagatttccaagtggtacgacgatgtttcgggattattcacagatccccccgccaaaaacgcccctctcatataagaacgtttgcagcagcgtttcgccaccagttcctcagaaatattccgttcaaatacaaagttctctccgaggattttcaattcctctaaaatcagctttgcattttcagaaaagcgcacaatataaacattgttttttttcagccgcattttttttctgactaacagttcgaccgatacatcatattgtttcttcagcaatgtataaatacggcgggcaatcgccgcattttcggtttgaacgtcaagcacgagatggcggtttgaaaatgacagtgaaccgttcatccgaatcagcgcggacagctccgccttggcgcagcagtccttcacttccagattcgtcagttctttttttgtttccgatgcaaatgacatattagccacctcatttcaaaaggcctctagtcccttaataaatcgacaagaagagaagccactttatgtgtatcgtgacggattacgccatttttatacgtgataatctgatccctgatgacctcaagccccatggatttcagcttttcaacattgaagtcgacgggccgggccagctctttcgcatatttgcttttgatttcgtcagggatctcctcattgttgattaagatcgtgtcgataaacggctgctccatatgatcgttcagcgccttgacatggtcggccgcactgtattgcagcgtctctccgggctgtgtcatgacgttgcatatatatacttttttggccgcagccttgacgacttcctctccgattttcggtacgagcagattcggaagaatgcttgtgtacaggcttcccggaccgataatgattaaatcggcctgacggatgacgtcaatcgtttccgggagcggatcaattttttcaggcgtaagaaacacccgtttaatccgctggccgtaagaagggattgtcgattctccggagacgacctgcccgtcctccatttcagcgtgaagaacgacactggtgttggcagccggcagcactctgccgcggacattcagcaccttgctcatttcggtgacagcgtgaaagaaatcaccggttatatttgtcatcgctgccaaaatcaaattgccgagcgaatgtccggttaagtcgcttcctttgttgaaacggtgctgaaacagattttcaacgagcggctcaacatctgacaaagcagccagtacgttacggatgtcacccggcggcggaatttgaagttcatcccgcagacggcctgaacttccgccgtcatcagcaactgtcacaatcgccgtaatatcaacgggcttatgctttaacccccgaagcagcacggacagaccagttccgccgccgaagattgcgattttcggcttcttattcatttccggcttctcttttcaatgtcccggtgagtgacatgagtatagaaatcttttttaaaatagtcagccaaatattcagcgagcgtgacggagcggtgctggccgcccgtacagccgatcgcgatgacaagctggcttttaccttcccgcttataagacggaagcataaagccgagcagatcaacaagcttttcaataaacttttgtgtttcgttccacttcatcacataggatgacacttcctcatctttccccgtaagcggcctcatgctttcaatgtagaacggattcggcagaaaccttacatcaaacacgaggtcggcatctatcggaagcccgtatttgaaaccgaatgacatcacgttcactgtaaatgtttcaccttggttcgtggcgaaatgcgccacgattttttcacgcagatcacgcggtttcatatccgatgtgtcatagatcagctgagagcgccctttcaattcttcaagcagctggcgttccagcgcgattccttcaagaggaagcccggtagcggccagcgggtgagaacgcctcgtttctttgtatctcgtcacaaggatggaatccttagcgtctaaaaagagaatgcgcggtgtaatccacggattttccgccatttcatccagcgcctcaatcagcctgtcaaaaaattcacgtccccgcagatccatgacaagcgcgaccttgctcatttttgaacttgattctttcatcagctccaaaaatttcggcagcaaggaaggcggcagattgtcgacgcaaaaatagccgagatcctcaaagctttgaatggcgacggttttccccgctccagacattcccgtaatgatgacgagctgaatatcatggttttcattcatactcatctttctcccccctgcggtctttcttttatttgataagctgcggatctaaacgatagctgagcagctcgaagtccggcgtatacgtaaaggtgccgtgcaaaagcccttggcccttgatcataaaatcaaggatatgcccgtctccgggggccatcggaaggctgtggatatcttttacgtcatgccacttcagaacgccttcctctgattcagcgacatttcgccccgtgtacgagtcggcgacgaaagtaaacatcatccactctgacacgatttgttcctgttccttaataataaaggtaaacacgccttttaactgcggatttagtatataaatgcccgtctcttctctgtactctctgatgacggaatctctgacggattcgccgctttccatcttcccgccgggcgcgacccaccagccccgtctcggcttttggagaaggagaacctgatcatctgtctgcagcacacaatttgtcactctttgcacaagtacgtcacctaaccttctcaacaaatcatcgtctcttcattataccgtttcggcatgtctctcacaatgcagagacaccgacatccttttcttttatttgacagaaaacagaaaatcgcaaaaaaagggcacggatactggaatccgtgccaaagtgtattcattaaaaagggggtcaattactacattcatcttaaaacatcagtatttcacccgtgttacagcgtaattaaaacacagtaacgattcaaaaactgaacattacagtgattatttaacggttttgagcgtttcctcaagctcttccacataatgctgaacactttgagccgcaatacttccgtcgcctgtcgccgttacgatctggcggagcgttttttcacggatgtctcccgcggcgaaaatgcctggaacttttgtttccatttgagcgtttgtttcaatgtagccttcttcatttgtgatgcccaagttctcgaacggtttagaaagcggaagcataccgatataaataaagacgccgtcagctttgaattcttcttcttctcccgtcacggtatccacaagagtaagtctgccgacttttccgttttcctcatggatttcttttacggttttgttccatttgaagtcaattttctcattgtcaaaggcacgcgcctgaagaatgctttgcgcacgcaatttgtcacgtctgtgaacgatggtgacttttgaagcgaagcgtgtcagatagacgccttcttcaacggcggagtctccgccgccgacaacgacaagctctttatttttaaagaacgcgccgtcacaaaccgcgcagtacgatacgccgcggccgcccagttctttttcgccgggaacaccgatctttttgtattccgctccggcagaaatgacgatggcacgcgctttatattcttttgaaccggctttgaccgttttatattctttaccgtcaacgatttctttaatatcgccgtacgcatattccgcaccgaattttttcgcatgttcaaacattttattagaaagttcagggccgagaatgctttcaaaacccggatagttttcaacatcctccgtgttggccatctggccgcccggaattcctctttcgatcattaatgtggataagttcgctcgtgatgtgtaaacagcagcggtcatccccgccggacccgcgccgataatgatcacatcataaattttttcttctgacaccatgattcactccttttcgaaatggggcgcaccctatatgactaagaatccccatcaatcgtattccttacccatatcctattaaatctgaaggcaattcgctatttttttgctcatttttctaaaaaaccgtgattaggcagctcctgagcgggtatacaaataaagaaagagccttccgggatagaaggcccttgtcttattcattattgcacgacacgtcttacattgccgttgaatgctttcttccagtaagggttgctcatagaatcaatggatacaccgtgtgatgtattatcgttcaggaacgttccgttacctaagtagatgccgacgtggccgtttgttttatacgtgttgaagaatactaagtctccgcgtttcatgtcagacgcgcttactgctttacctcttccgattaatgtatctgtgtttgtgccgcttgcaggtccgagattaacgcctgcgttagcataagcccagcgtacgaatgaagagcagtcaaaaatacggttgtcaatatcggattgagtgcgtccgccgccgaacttgtacggggattgacccacaaggcttgatcctacgctgatggcgccttcaataccgcctgaatttgaaataacagatccgccgtcagaatcatctgaaccgccgctgttatgagatgatccgcctgaagtgctcttcggtttgcttgagctgtcagatgaatcagatgatgttgaaacagccgcttttttcacagttttaaccgccggtgccggctggctgtcatctttttggttttggtcttcagaagctttttgcgcttcttcctgttttttgatcagggcagccgctgcagcctgctcagctttaatgcgcttctgttctttttcagtgtcagctttttcgtttgcaagctttgatgcttcttttttcagatcagagatagcggaagccgcttttttctggccgtttttcgcttcgtcgaaaagcttgtctttctgatcaagctgtttgttcaggtctttttgcatagactcgagtttcgcaagatcatcttgaacttttttcagcttcacgttaagttcagcttctgcgtcttcgagtttcgctttatcctgctcctgctgtttgatcaggtctttatccgcgtcaacgatagaagataccgcagtcgcacgggaaatgaagtctccgaagcttgtcgcccctaaaagaacatctatgtatccttgagaaccgccgttttcctgtaaagaacgaacgcgttttttcaggatttcattgcgtttttcaatacgcgcttctgtttctttgatttcttttttcaaatcagcgatctgctttttcgttttttcgttttcagcttttttatcttcgattttattgcttgtatccaacgctttagcgttaatgtctttcagttctttttcaatcttagcctgcttgtcctgaagcttagacaattctctttcttttgcttcaaggcttgaagccacctcagattgcttgctttcaatttttgcttttttgctgtctaatgtttccgccgatgcagtttttgtaaacgggatcaaaaaactgcttgtcccgatgacggaagccaaaccaagtgttaataaactctttttcactttttctttcctcccttttactttaaacctgttctcatttggaattctattatgaacatcaaagttacgctccctcacatacccgtgaggctgatgatttttatgtataaatctttaaatcttttaaattggtatagattatacagcacatgtaaaataaactaatctcttatgtacgagactcattataccatcatgtttcgacaatttttattacagttatatttcaatgtgattgcaaatctcatattttgcaaaataaacggtgattacggcctgatttcgattcgaaaagcaaaaaaatacgtatgaatacctcttttttcggcggtaaagttctgttttgcccctttctgataaaaaaagaaccgactctttatatagaaagaatcggttttattctaaaatatcatctatttgtctgatgtatttcgaaagtgttgccggggttataccgtaaacggcggccgtttcttttttcgtcgttttttcgccgtttgcttctttccatacatatgcgatggctgcggcccatgcccgctcattctgtacggcagcggcggcccggatatgctgaatgacgtgaaaaacccagcagctcatgacgtcagtttttaaactgtcggcttccgctttctccagcagcttgaccgtccgatacgtgaacagcgcatcaccggagacgcctgaagcgcctttttcaccggaaagcagcagtttgacgaaatcttgttcaaacggtgaaacggcgcgttttgccgtcagaactttttcaagctggttccgctctccttcagcgctgctgatataataggcggcaagccgctgttcaagtgaagcaggcagcggttcctgccgctccgcccaaggcgcgggccggtctgattcgggaaattcggcttcggcctttttccaaatggtttccgcaaattctgtgcggcctgtcccgtaggctgaggcggccagccagtaataaaacgtttcgtcgccttcgaatccgcttttgtaaagagaacggagccatttataaccgagatcatgtctgccgacaagcgcaagcgtcgcccccagcttatagcgctgttcgaataaaatcggatacacattggcgagtcttccgctcaattctccgactttttcatcttccctctcgtaatagcagaatacaaggaggttgcacagggcatggagattgccttcatttttctcaagcacttcgaatactgtttgtttcgcttttgtgacattgcctgagtaaaagtaagcgagcgccaggttgttgtatgcagaccaaagctcggggtaatcggccgtaatctcttcaagcataacaaccgcttcatgaagctggccgctctcaagaagcgcttttgcccgatcctgcctgatcagcagctcatcctggtcatagagcgattcgttttcacccgcttcgccgaaatccaaaagctccatcagattttcaatctcttcgctgaattccccgtccggatcggcatctgaataagccgccgcttctttgtatgcttcctgaaagagccccaaatgcgcgaaattattcgctttaaaataatgacactcgggcatttcttctttcaggttcaccaaaataaagtcgaacagctcatttgactgctggtagtggcccatttcagaataaatgacggccagccgggacagcatttcggaatcattcggctcgaggtggacggcccgctgaatcagtttgctggcccgctttaaattccgctctttatatgcttttaagcctttatgaaaaaaatattgtccatcctgaagcagctggacaatttgcgcgtgctttttctgttcagaagtgtgttttcccacaaatatcctccgttttatacgtattaccgtcagtagtataccataaaacggtttcacctcaatagttcaaaagacaggatcggcttcgttttttactggctggttcgaccagattttagctgtttttttcacgaggctcggctggaagaatgacacggaaaagggttccttcgccgcgcttgctctcaacctctatcgaaccgccgtgcagctctgcgattttttgggcgatggacaggccgagcccgcttcctccttcgtttctcgccttgtccgctttataaaaccgttcaaatacacgctccgcctgttcaggctccattccgattccgtcgtcggcgatttcgacagccgccgctcccggcagatctgcaattttaacggaaatgcggccgccttcaccggtaaattttacggcattgtgaatcagattcatccatacttggctgagcagcgcttcatctccgtacacatacgactcctgtaaatcaatgagaaactcaatctgtttggcggaccattcaggctcacaggtcaatatggtgcgccgcagctgtttgtcaatgcggaacggttttttttgtatcggttcggtttggcgttcgagcgcagtgagcttcagcagattttcactgatttttgataatcgttctgtttctgtttcgatgatgtgtaagtagcgcccccgctcctcatatgataaatccggttttttcagaaggtgcgcgtagccctttaatgaagtgagcggggtttggatttcatgggaaacgttcgaaataaattcttgtttcagtttttccatttcactcagttccgcggcgagtgtcgacagttcatcagccaatttcgtcacgggatggttccgctcaatcttctccattttccgggaagcggccgctgtgaagttgccgctcgacatttgcttgatcgtggcggtcagcgaatcccagatcgcatgatgcctttcacgtgctgactttgaaaaaataaacatcgttacgaacagcaggccgaaaacaagccaaagcgtcagaatctgctcggcgtacggcacaagcaaaatcggccatatgagaccgaatccctgaacaatcaggtgagccgccagccataagaatgcggtgacagtgagaaggatgatgattttcccagccgttctgaagatccgtttcatcctgtcaccacaaaccgatacccgagcccccgcaccgtatggatggcaaacggatagtctttttccggaaaccgttctctcagccttttaatatgcacatcgacggtacgctcgtcaccttcataatcaaagccccaaatatcttctattagttgttctcttgaaaacgtcttattcggataaccggcgagcttaaataaaagctcaaattcacgccggggcaatgtcaatcccgctccgccgccgcgcgttacggtgcgggattgcttatctaatgtgaccgttccgatggtcagcagtttttcagcggtgatccggtaccgtttcagcaatgctttgacccttgcttccagctcaagcggctcaaacggtttgacgagataatcatccgctccggaagtaaaaccttgcactttgtccagcgtttcgccttttgccgtcagcatcaaaatcggaatgtccgtaaagctgcggacggcttcactgacttcaaacccgtccattttcggcatcatcacatccagtatgatgagatctataggtgctgattcgatcagccgcaccgccgcttccccgtcttccgcttctgcgacgtcaaaaccgctctgctccatcataaggcggacaagctcacggatatggcggtcatcatccgcaaccaatatgacagccatgaaaatccctccttctgcttttttcttttcatgaatcgacatgatgtctataaaccgaattttttcattgtctcctgtaccggcatacacgcttatggcttggctcttcatcgttaccgaccgtacacccgtaagaacaggactccggctgcaaaataaaaagcagctttttcagctgctttttattcataaagtcttgctttacacagctttgttttctaagtcggcattcagcttcagctgctgctccgcaaaatcgcggtacagcgaatgggatgccattaattcatggtgtgtgccccgtccggtgatttcaccctgttcgacaaagagaagctgatctgcatccacaaccgtggataaacggtgggcgatcacaatcgtggtgcggcctttcattaagacttcgagcgcctgctgcacccatttttcagattggctgtccagacttgatgtcgcttcatcaagcatcagaatgctcgggttgcgaaggagcgctctggcaatggcgatgcgctggcgctgtccgcctgacagcataattccccgctcaccgacctctgtttcaaatttcttcggtaagtcttcaataaattgcagggcgtaggccatgtcagccgcttgcctcagttcctcatcagtcacctcgcgttttaatccgtagcagatattctcgcggatggtgcctgacattaacgggctttcttgcgacacgtagccgatatgctcccgccatgactcaagggaatacgcatcaatcggttcatttccgagcaggatgctgcccgcagtcggattgtagaatcgttcaagcagcttaaataacgttgtttttccgccgccgctcggtccgacgatcgcggtgactttgccggcctcaatcgtagccgtaatgtcttttaagatggtttgatctgttttgtagccgaatgagacttgttcaagcctaatcggctgatccgcgttttcaatggcttttccggtttggatatcttcttctttttctgcaagaatatgaatcatccgttccgttgcgccgacggatttttgaagctgtgtgaaaaatgaagtgatctggcccatcggcataatgatctgaaacaaatacaggataaaggcaacgagtgcgccggctgtcagttcaccggatgacacctgcatcccgccgtacccgatgacagcgaccagcgccgccattaatacaagtgtaataagcgggcctacgagcgactgcaccttcgcttcacgcagcccgagtttaaagagcgccatgatgcctgcttttccgcgtccgtattccgcttcttcagcgtttgacgcttttacaagcctgatttccgggaggatgtggtttaataatccggtgaatctcgccgtttcatcctgtgtttcccgagaaattttaaacattttccggccgatcggcactaaaatcaccgcagccagcggcacgacgatcagcacgagcaatgtgagcttccagttcatgaaaaataagatcgtcagtgacccgataacggaaatgattccggtaataaatccgctgatattgtttgtgatcagctcttttaccaccattgtgtcattggtgacacggctgatcgtttctcccgtggcgtttttgtcaaaataagagacgggcagtttaattaatttctgccacaacaaatcacgcagtcccgagatgattttctggccgctgtagttcagggcgtaggtggcgtaggcgcttaatgcggcctgtacgataaacacggctgcgatgattccgatttgcacgcctgacagcgacgacatggaaaagccgtcaacgagctgctttgtcaacagcggaatcagcaggctgacgagcgttgtcacaatactgagagacagcgcgaaggccagcataccgtatgatggttttgtttttttgactaatgaaaagaatgagctgaatttccctttaggttttggttgtttattcggcatatgttttcctcctatatcactgtttatactataacggatgtgcatgaacggaatatgaacaaaacgtatatttttgataaaaaccaaaataaactctattagtcaatattatcaaattcatctgcctccggttgcggaaataaggaatatttaattgaatgtttaagtttgacagattaaaaacctcacggatctctccgtgaggtttgttttactcagatgctgaatggcgtttcgcaaggacgtcaagcacgtcgtccaaaggaagcgactgctcacgcagaagaacgagcaaatgatacagcaaatccgccgcttcccattttaattcttcttggtcgcggtttttcgcggcgataataacctctgcggcttcttcgccgacttttttgaggattttatcgacgccttcccgaaacagatacgttgtgtaggctccgtcaggcatctccgcctgccgtttggcgattacgctttccagttcatttaagatgccgaaacgatcctgcgcatccgctttttccggagaaaagcagctgtagcttcccttatggcatgcgggtcctgagggctccgcaagcacgatgagggcatcttgatcgcaatcatagcggatggctttcaccttttgggtattccccgatgtcgctcctttatgccacagctccccgcgtgaacggctgtaaaaccaggtttctttcgtttctatcgttttttcgtaggattcacgattcatataagccagtgtcagtacttctttgcttgccgcatcctgcacgatggcgggaatcagtccggcctcgtcaaaccgcagttcatctgcccgtttcatctcacattcaccccgtgtttcttcatataatctttcacttcttttatagatgtctctttgtaatggaaaatggaagctgcaagcgcggcgtccgcttcaccgatcgtgaaggcttcaagcatatggcgcgcgcttccggctccccctgacgcaatgacgggcaccgggacggcacgtgtgacaagctgtgtgagcgtatgattaaagcctgttttctcaccgtctgcgtccatgcttgtcagcaggatttcacccgctccccggctgacggcttcttttgcccaggccgtgacttcccactcggttttctgtctgccgccgtgtgtgtacactttatagcaattcgaatcttcgtcatactttgcgtcaatcgccgctacgatgcattgcgagccgaaaaaatccgctccttccgtaatcagctcggggcggagaacggccgctgtattaacggatactttatcagcgccggcgcgaagcattcgtttcatatcgcttaattgattaattccgccgccgaccgtaaacggaatcgccagttttgccgcaacctgttctacgacgtctgtcatcgtcttgcggccttcgtgagaggcggaaatgtcgagaaaaacaagttcgtcagcgccctccctgtcgtaagcttcggccagctcgacaggatcgcccgcatctttcagcccgagaaattgaatgcctttgacgacgcggccttctttcacatcgagacacggaatgattcgtttcgtgatcatgcgtccttcaccccgctgagcgcttcagccaatgtaaattgttttgtatacagcgcttttccgataatcgctcccgatacgccggcgtctttgaagcgggccagtgctttgaggtcggcgactgagctgactccgcctgaagcgatgacggtttttcccgttgcttttgcgagctgaacggtgctttcgatgttcggtcctgacagcatgccgtcagttgcaatatccgtgaaaatgaaggtttccgctccttcggccgccaattcacggcccagatcggccgctcttaccgaggatgtttccagccagccttccgtcgagacatatccgttccttgcatcaagaccgatcgcgattttgccgccgtattgtttcagcatgctcttcacaaatgccggatcggaaacggccgagctgccgagaataacgcgatcaacaccttgtgataaataaccgtacacatccgcttcagaacggatcccgccgccgatctcgactttggcatcaagctgccgcgcaatgtcaagaacatgcctgtcgtttactttcctgcctgctttcgcgccgtcaaggtccacgagatgaatccattcggcaccttcgtttgcaaattgcgccgccatgtctaaaggagagtcaccgtatatcgtttccttgccgtaatcgccttggatgaggcggacgcatttgccgtttctcatatcgattgccggatataatgtaaaagcgttcatttcttcaccttctgttccgctgccatttttgtaaattgcgttaagatcgccattccggccgtaccgcttttttccgggtggaactgtgcaccgaagacattgcgtttcccgacgacggccggaacacgaacgccgtgctcagcgcttgccagaagatcgccgtcttccatcccgtctatataataggaatggacaaagtaaacgaagccttcttccgcttccgaaagcaaaggagacgtttggtgaaacgtcagccggttccagcccatatgcggcaccttcagcttgtttccttcggcatctctgtctttgagtctcacagcttttccggctaataaaccgagtccttttgcagagccgttttcggtgctttcttcgaaaatgagctgcatgccgaggcagatgccgaggagcagcttaccctcgtcaaccatacggtgtatgaattgatcaagctttgcgctgcgtaaattgtccatggcgtcactgaatgatccgacaccggggagaataaaagcatccgctttttcaagctcttccggccggtctgatacgacatacgggacaccgacgcgttccagcgccttcgacacgctgaataaattgcccataccgtaatcaattacaccgatcatttacagcattcctttcgtagacggcacacccttgacgcgcggatcaatggatgacgcttcatcaagcgctctgccaagcgccttaaacacggcttctatcatatgatgcgtattcgtgccgtaatgaacgatgacgtgcagattcattctcgcttccagcgccagtttccataggaattcatgtaccagctcggtatcaaacgttccgactttcgcttgcggaaatgcaccgcgcatctcaaggtgcggccggttgctcaggtctacggcgacttgggcgagcgcttcgtccatcggtactagcgctgatccgtaccgtttgatcccttttttatcaccgagcgcctccaaaaaagcctgccctaagcagatgccgatgtcttcagtcgtgtggtgatcatctatctccgtatcgccttttgcgtcaacagttaaattgaattgcccgtgctttgtgaacaaatcaagcatatgagtcataaacggcacatccgtgctgatgtcggcttttccttctccgtctatttcgaaagccagcttaatatcggtctcatttgttgttctggcgcgttccgcttttctcatcggtcattcctccgtttctcgcttcaatcgatcttgcgtgcgcttcaagcccttccagtctcgcgaaggcggaaatgctgtccgcgtgcgtttcaaatgccttccggctgtatgagatgatgctcgatttcttttgaaaatctgttacattcaacgggcttgaaaaccgcgccgttccgtttgtcggcaaaacgtgattcgatccggcaaaataatcgccgaccggttcagcgctgtatcgccctaagaaaatcgcccccgcgtgtctgatgcttccaagcaaagcctccggcgaatgcgtcatgatttctaaatgctcgggcgccagcgcattcaccgtgtccactgcatcttccatcgattccgcgatataaatgcggccgtgatccttgatcgacgcttcggcgatttctttgcgcggcagggtctgaagctgtttatccacctcatctgatacggcttcggcaagcttccgtgagtcggtgacaagcacgcttgagctgagcgtatcgtgttcggcctgtgaaagcaggtcagcggcgacttctttgggcaccgccgtatcgtctgcaaggaccacgatttcactgggcccggcaatcatgtcaatatccacaacgccgaagacttcgcgcttcgcgagtgctacaaatatattgccgggacccgtgatcttatcaacaggctgtatcgtttcggttccgtaagcgagcgcggcaatcgcctgcgcgcctcccgctttgtaaatttcctttatgccgagctcagacgccgccgccagaacgcccggcgaaaggcggccgtcttttcccggaggactgacgagaacgatccgttccactcccgcagcgagagcggggatgacattcattaaaacggaagacggataagcggccgtcccgcccggcacgtatacgcccgcggaatcgagcgccgttattttctgcccgagcatcgagccgtctttgcgatggtaaaaccacgaggattgcagctggcgttcgtgatattctttaatattggcaatcgcctgtctgatcacttccagcagctgatcatcaagcagacggtacgcctcggtgacttcctctgcactcacggccatttggttcaggctgatgccgtcaaatgtttttgtataggccaaaacggctttgtcaccgttttgtctgacgtcttcaataatccccctgacggttttccgctgctcttcggttccgctgtcgatggaacgcttcagtgagaaccgctcgcttctttttactgcggttattttcattgtgccgtttctccttccacaaccctggccaacctggccgccatttcgtcgattacatcatccttcatacggtagctgaccggattgacgataaaacgcgatgtgatgtcacaaatatgttctgattcaacgagaccgttttcttttaatgtccgcccggttgatacgatatctacgattctgtcagcaagcccgattaaaggcgccaattcaatcgaaccgttcagcttaatgatttccacctgctcgccctgctctctgaaataacttgacgcaacattcggatatttcgtcgcaatcctcggggcgactccgttccaatccgctccgggaagccccgcaacggcgagatggcatttgctgattttcagatcgagcacctcatacacgtcacgctcttcctcaagcatgacatcctttccggcaataccggcatcagcgacgccatgctcgacataagtcgtgacatccatcggctttgccagaataaagcggagattttcttcaggaacgtcaatgatcagctttctcgattcttcaaactcctcgggcagcctgtacccggcctgccgcagcaacccggccgcttcttcgaatatccgtccttttggcattgccattgtgagtaccttacccattctgctcttcctttctggcaccgataaagtatgtgacgtttgcgaatgattttgtcatatgatcgatattttcaatgcccgccagatcctgcaggacgacttttctgcctctcgccctttcttcctccgcgaataaaatggcctgcgcccgttgctccttgctgaaaatcacggcatccgcttcactagtttcttcctggatgccgagcgcttcaatcagcctgtcgatacggagcccgaaacccgtggcgggagcgggactgccgaaatggccgagaagattgttatagcgtccgccgcttccgatgacaaaaccgacatttgccgcatacacttcgaataaaattcccgtgtaataactcatatggcttaccatattcagatcaaggcgaatatgctcggcacatccgtaatcctcaagaatgtcccacaggtcttccagctcctgaatcaagctttgtccggagatgccgatgatctcctccgctttggcgcatatctctttcccgcctcgcaattccagaagtgcgagcagccggcttttgtctattgaagaaagcggaagcgatttgacatgttccctgtatcccacgtaattcttctcaaagagaaagcgccgcagaacatccgcccgctcagcattgcccagaacctcgacaaacagctcatcagcgagtccggcatggccgatcgcgattttaaaccggtgcaatcccgcgtttttcaaagcgccggccgccagcgcaatcacctcggcgtccgcgcttgttgatccgtcgccgatcagctccgcgcctacctgttcgaattctgccggacgtccgccttcccgctcctgagcgcggtagacgcttgccgcgtaccccgctctgagcggatgattgtgtttgtgcagcttagacgccgccaccctggcaatcggtccggtcatatcaggccgaagcacaagcgttttcccgtcctgatcgagaagcttaaacagctgctgttcttcaatggctgactggacgcctactgtttcataaaattcaagggtcggcgtctccataaactgataaccccatttatcaattaaatccgtcagtgtggaacggacttttttcttggcttcgtataaaccgggcagcgtatctctcatgccatgcggtttctcaaacataaacatttgccttttacacctccgctttgtctgaaggaaaattccaaatcctttagttcgctaatatgataatatgttagcagataaaagaatgaattgcaacgcccaatgtccgcctattcttttccataaacatggctaaagaatgaacaaacctgtaaacatatcggaacgatcgaatcatattgagcagaagtgctataatacatagaatagcttcaacagaaacaagggagaagaattgataatgaagacgcttggaacattatgtgtgctgattctgacagccgtccttgtctatctgggatataacatctatacaaacgatattcatttgaattttttcaatcagcagtccgacgagcctgatgagaaaacaccgttaaaagggagcgcgtcaccgctgaatgtcgttctgtacagacagatggattctcccagactgtacaatggctgtgaggtgacaagccttgccatgattttgaacaatgccggatatcatgtgtcaaaaaatacattggcggataaaatcaataaagttccgctcacatacagcagcgggctgaagggagatccgaatgaaggatttgccggagatatggaaaacggcccgggtttaggcgtttatcatgagccgattgataaacttgccaaagaatatgcgggaaacaaagtatacgatctgacgggaaaagacatttcttcagtgtaccgccagcttgaaaaagggcggccggtctgggtgattaccaccacatcctttaagccggttgataatatgcagacttggaatacgccgaacggaaagatcgacgttacgttcagcatgcatagcgtagccgtcaccggttatgatcacgattatgtatacgtcaatgatccttacggctataaaaacagaaaaacagatcggtctgactttgaaaaagcctggaagcagatgggcagccaggccattgtgatcaagtcataaaaaaaccccgctgacgttaatcagcggggttttcccattcgttctttcatttcttcgtccgtatagatcacctgcatcggatttcctccgacaaacgccccggccgggacatctttgtgcaccagcgtgccggctgatacaacggctccgctcccgatggtgacgccgggcagaatcgttgtgtttgccccgatcattacctcgtcaccgattgtgacaaaaccggtccggtactcatgtattaaatattcatgagccaaaatcgtcgtattgtagccgatgatactgttttttccgacagtgattttttcgggaaacatgatatccggcatcaccatcagcgcgaatgacgtctgttttccgacattcattttcaaaaaggttcggtacagccagtttttcacgcttaaaaacggcgtataccttgcgatctgaatgatgatgaaatttttcatcaccttcagaaagggaaccgtctgataaacatgccacaatgaatttgcacctgaaaccggatggcggtctgtttttctcacggattacttcactccggtgatgtgcaataaatcactcattttctcgagcatataatcgggttcataggcggaaagcgtctgtgcgcctttaatcgtccacgcgacgccggctgttttcgtgccggcgttttttcccgccatgacatcgtgataattgtcaccgaccattatggcttccgacggatcgcacccaagccggctgagagcaagccgcacaggctcggggtcaggcttcggatgctttacatcatcaagcgtgacgacagtatcgaaaaacgccccgatgcctgtcagcttcaatcccatattgactgtatccctcagcttcgtggtgacaatcccgagctgatatcccgcttttttcaattcatccagcgtttcataaaccgtttcgtactccgtgacgagctcatcgtgcttttcatggttgaatgctctgtacatgctgatcatctcatcgcacttttcagcattaatgcctgaaaacgtttcatacagaggcgggccgataaacggaagcacatcttcccttttgaactgccccgggcaataatgatcaagcgtatgaagataagaagcgataatcagttcattcgtgtcaatcagcgtgccgtcgagatcaaataaaatggcggttacacgtttatcagtcatcttatgtcctttccgatttcaggcgtcagtccgtgtcggcataccgcttatcggcataccccttcatgcgtctgaaaatcattaaaataatcgcaagtacaatcagcacaatggaaatgacctgcgcgatccgaagctggctcgtaagcatcaggctgtccgtccgcattccctcaataaagtatctgccgatcgaataccagatcacatacgtcaaaaatagattgcccctgcgcaggttcacgcggcggagcagaagcagaatcacgacgcccgcaaaactccacagcgattcatacaaaaacgtcgggtgataatattgtccgtctatgtacatctgattaatgatgaaatccggaagatgcagactttccaaaaatgaccggctgaccgcttcaccgtgagcctcttggttgataaagtttccccagcgcccgatggcctggccgagcagaatactcggcgcggcaatatccgccagcttccagaatgagatgcctcttacttttgaaaagacgattcccgtcgcgatcgcgccgattaatccgccgtgaatcgcgatgccgcctttccaaattttaatgatttccccggggtgttccgagtaatagctccactcgaaaagcacataatatgcccttgcgcaaatgattgcgatcgggatggcgaaaagaacaagatcaataaaaatgtcctttttcagcccccgcttttcactctccctcatggccatccaaagccctaataacgcgcccgcgccgataatgattccgtaccagtgcacggataatggcccgagctgaaaggcaatcggattgattggtgttcctgcttcgttcatatcattgccaactcctattcgtcttgttcgccgtcctcaatgacatccgccagcttattcgtaaattgctcggcagcatttaagcccatccgcttcaatctgaagttcatcgccgcaacttcgataataacggcgagattccgccccgggcggacaggaatggtcagttttgtaatttccgtatcaatgattttcattttttcttcttcaagtccgagacggtcgtattgtttcccttgctcccaaagctcaaggtccatgacgattgtaattcttttattgcttctgacggcgcccgctccgaacagcgtcatgacatttataatgccgagccccctgatttcgagcagatgctcaatcagatcaggcgcgttcccgacaagggtatcctgatcctcctgccggatttcaacgcagtcatccgcgacaagacgatggcctcgtttgacaagctccagcgccgtttcacttttaccgacgccgctttttcccgtaatgagcacgccgacgccgtatatatccacaagcacgccgtgaatggccgttgtcggcgcgagacggctctcaagaaaattcgtcagcctgcttgacagcctggttgttttcagaggggatctgagcacaggcacgccgttttgctcggaagcttctacaagctccggcgggatcggcatatctctggaaagtatgatagccggcgtcacatcggtgcacagcgatttcatccgctgtttcttatcttcctcgggaagctgatcgaaaaatgacagctccgtttttcctaaaagctgcacccgttctctcgggtaatatgtaaaataaccggcgatttcaataccgggccgtgataaatcactcatcgtaatcgggcggttaatcccttcttctccgctgatcaattctaaatggaactgctccattacgtctttggtccgaacctttgccaagatatgttcctcctgttctgggatgttccgagctttgaacagttatattttatcactttaccgtctgaaccaaaacagatttatacaattccggcataactggtctagataactagtctgaaaaagagtaaaataaaactaacaactaaccagaaaggcgtgttttaaagtggctgaaagcttgttaatcagcggtgcggacatcgtaacagaagaagaaatcatccgaaacggatttcttggtataaagaacggcatcatttcttacgcggggaaaacaagaccgcaagaaacgtatgagaaggaatggaaggcgcccgagggttcatatgcgcttcccggaatgattgatattcatattcacggcggatacggcgcggatacgatggatgctgatgttgcagctcttgatacaatgtccgcccggctgcccgaagaaggaacaacctcttttctagcgacaacgatcacacaacggcacgaaaacattgaaaaagcgctcgtcaacgccaaagaatggacgtcttcctcaccgcaggcccaaaaaggcgctgagttgatcggcattcatttagaaggaccgtttgtctctccgaaaaaggcgggagcacagccgaaacaatggattactcctgctgatgccgggctctttcagaaatgggagcggctctcgggagggctgatcaaaatcgtgacgcttgcgccggaagaagatcctgatttcagcctgatccgttatttaaaagaccaaaacatcatcccttcaatgggacacacagacgcgggagccgagcttttacaaaaagcggcggatgccggggcggtgcatatgacgcacctcttcaacgccatgagctcctttcatcatcgtgagccggggggcatcggtacggctctcgcctgcggccgcatcacggcggagctgatcaccgacggcattcattcccatcctttggctgtaaagcttgcctatttggcgaaaggaagcaaaaacctgatcatgattacagactccatgcgggcaaaagggcttaaggacggagaatacgaattcggcggacaaaaagtcaccgttcgcggggacacggcgcttctctctgacgggacgctggccggttccattttaaaaatgaatgaaggcgcggcgctcatgcgcaggtttacaaactgctcatggctggatatagcaaatatgacatcggcaaatgcggcccgccgcctcggaatattcgaccgtaaaggaagcatcgccgaaggaaaagacgccgacgttgttctgacggacggacagtgcggcgtgctggccacgatttgccgcggaaacaccgcatatatctcaagggaggctgattggacatgaacgttatcacatgcagacattatgaagaattaagtgaaaaagccgcatcgattatcgctgaaacagtgaaacaaaagccggatgccgttctcggccttgcgacgggaggcactcctgaaggcgtatataaagaacttgtgcggatgcaccgctcagaaggcttgtcattccgaaatgtcacgacgatcaaccttgatgaatacgccgggctttctcctgaggacaaaaacagctatcattattatatgaatacacatttttttgcacatatcgacagccgaaaggaccgccactttctccctgacggacgggcagacgatcttgatgccgaatgcggacgatatgaccgattgattcaaacactcggcggagcggatatacagcttttaggcatcggacacaacggccatatcggctttaatgaacccgggacgccatttgaatcccgaacccatgtcgttgagctgaatgaagagacaagacaggcgaatgcgcggtactttccgtcaattgatcaagtccctgtaaaagccctgacaatggggatcgggacgattttgtccggcaaacggattttgatcatggcatccggaaaaagcaaggcccaagcggtgaagcagcttctggacgggcgcatcagcgaagcattccccgcctccgccctgcacgcgcatccggatgtgacggtcttgattgatgaaaaggctgcgggcggcgattgaaaggatttgacctatgcagattgataaacaatctccgattccgatttactttcagattatggaacaattaaaaacacaaatcaaaaacggcgagctgaaagcggatgcgctgcttccgtcggagcgggaatacgccgaacaattcggcatcagccgaatgacggtccgccaggcgctttccaatctggtgaatgaaggatttttatacaggcagaaaggccggggaacgttcgtcagcaaactgaagatggaacagccgcttcaagggctgacaagctttacggaagatatgagaagccggggcatgaagccggggagcagacttgccgaataccagctgattcaggcgacggaagaattatcttctatcctgggatgcggctatccggcaacgcttcataaaatcatccgcgtccggctggcaaatgatatcccgatggcgattgaggcctcgtacatcccgtttgacaaggcgggaaaactggacgcctcccattttcaatcatccatgtatgagcatattgaagcgtacaatcagatgccgatctcacgggcaaaacaagagcttgaaccgggagccgcttccgaggaagaagctgagctgctcggtatccagcccggcgcccccgtcctctatatcaagcggaccacttatctgcaggacggcactgcctttgagcacgtcaaatccgcctacagaggcgaccgctacacattcgtgcactatatggacagggtgaaatgaaacatctccaaccgttacgggttggagatgtttttttgatctgccattttcaaatcaagccggggaatattctctatgactctgtcaaaacggagaggctggggttctggtatctatttttataaagaaaagagtaataaaatgctaccctctgttttggacaatatacggaacctgctttgaaatcagcagcagcggttctttgtttttatgagccagtgaaaacatgattgcgccttcaatcatcgagttgattgtcaccccgagcttctccgcttcctcttgttcaaacccatgctcaagaaattttgccgcaaacacatccgtccacttcttgaacacctcaacacatgtgcatcttaacgtttcattgatcagagcggtctcacccgccagcaatccaaccggcacgccctcaatattctgcggatcattaaactgttcagccgttacatgaataaagtgctgaatcgcttctacagggtccgcgaattgagacatactattctgtatttgcttttcaacgcatcttcccgtatatttgatcgccgcaatggcgagttctgcttttccgtttggaaagtgatgatacacagaccccctgggtgctccgctctcttttataatttgattcaaaccagtcgcatggtatccctgaatctgaaaaagatatgcagaggtttgaataattctttcttttgtcccggttttactgttcattatgtttcctcctgcatattacgaaaaccaatcgattttagtatagaaaagggacataaaaaagtcaaaagcacttatcacagcagggcgccgccatttacgcacagaaaaaatcctgctgaccgtcagattttcttctgagcgatcagcaggctgtatgttttcgttatgggtttgaggcatgcctgaaatcaaactgatccggagccgggcgatacggcgtatttcccgttctgaacatccacagcggtgatattgttttgccgttgtaagggtccttaacaacggtgtaccagtaataaacggaatcaggctgcaggccgtcccagacccaatttgcggtttttccgctttttacgtgttttttatgaccgagcagttcgttcgtatagacgttgcattcaaaataatcggtcgctacccttttcctcttcggctgtaaatccatttctgctgagaattcgtctttatcagcgaacagatcggtgtcatagtaattgatgtcatccgtgtacggcgagtaggagaacatgtgaacctgattggcggcctgatcgaattgcatcatgcgcataaagccctgccccccttccggaccgtcctggtagtcggtcagaatctggtggacgaggcggtccggttttccgtccctgtcatcgtcaagcgcatcggtttttttcatggcgttatggtaatggccgcttaataccatcgccacattgcgattcggcttgacgacttttcgatagatcgtctccccgatcgggcttcgatttccgctcacaagcaagtactcatgaaagcataagatggcggttcggtccggatacctcttcagcacttgattgatccagtcaatctcttgttccgcaatgccccagcccatataaatcataataaaatcgttcccgcttgccgacagcagatcataatgcccgcggttatttttgtatgatccgccgtaatgcatgttctgttcaaaccggcggctcccgaagaaatccccgaatgttcggtatgtgccgtctttatggccgacgtcgtgattgcctgcaagcactccgtacggaattcccgccttgtcaagcgtccgcatggagtgatcggcgtttttccactgtttcatcaccattgaatcatcgacgatatcaccggtatgaaagacatatttaatattgtgcttttccttattttctttgatccactccgtcattttgtcaaaaatgtgcgggtgcccttgtgcgtaatactgtgtatccgacatccagacaaacgtgtaattgcctttcgccggtatttgatcctgcacgatgacattcatttttgagttcttcaccacatccactgcggaaacggctgcttttaatgtaaacggctttttatctttggcaagaacgctgtccgcctcctgccagcggcttgtccggtaattccaaatatacatggttacctttcggccgggcagagagcttcctttccagaccgcctcggccagatccgtttcgtcgatagacgggtcaacggagacttcgaaccggtgataaggaaaacgctccatactttccgccgaaacggtttttccgtcatttgccgagatgcggttcatttccggcagggtaaacggcatttcattttcttttatgcccctcggcggttccgttaatgaggcgtgtttatacactttcacgctgcccggattccgcgcggtataacggaagccgcgataaaatgatacattcatgtcatccttcgtcgggtcttttacccggacggacagctttgctttgtgggcgccgattttttgatcggcaagctccggctggttcggctcctcccgtttgatatggaaggtgcggacggaccttgtttcatttccggcaaggtctgccgcaataatggtaagggtatgttttccgggcttgagatcggctgatgacgtgtgatgcgggagcgtaatgctttctccgtccaaaaacgctttgacctcttccactttgctccatttgtcacggatgtccgcattcagctcaacattacctttcagcgccgcgccttctttgatacccgggacaatcttcggccccgtattgtccacccgcacagattggctcagctgctcctcaccgtcgctaacaaaaatatggtgatagccttcagaaagcttcgccgtgttccacggcagcagccgtgacgtaaacaaatgatccggcaggctgaatgagaaggtcttctgctgattcgcccgcctgccgtcaccgataaacagctgctcagccggatccgtcttcccgtctttgatcaccgttccgtccgaaagcaccagacgggcatgtttcacgacaaaatcatcccgattctctcctgtgtcatacggagaaacctttgagcccgaacggatggatactttctgcgttttgccccctttttgcagcagacgttccggaaggagaaccgagtgcgttctgtagcggtgagacggatcgtcaaaaatgtgcagcacctcattttccattatgacggtgttttgaaaataaagattcgttttccgggcatcgaaggcgaaatagacctctttttccagcgccggccgggtctcctgccgcttgccgtcaatccacagcttgatcttatcggcgctgacgtcggaagtcgctttgagcagataggtgccggatatcgtatcttcgggttcaacattcattctgagtccgtgtgatttgctcgtctgttcaatgtcaatcatcttgacgggcgtttttgcttcattttctccatcactggctgcgatataatactcaagctgatcctggccgagcagttccggggaataaagaatgtgatggtataagctgtcgttgcggtctttttcggccagaattcgtttgaatggttttttctcattggtccggtaataaaacgcggctgttttgacaaggtttttgtcttttatgtcagcctttaattcaatgctttcagcgggccggacgggctttctgtctgtaaggtcttcgatgaccggtttttccttgtcgggttttatcacccttttctgctgcgggatctgcgcctgaaaaacagagcccggtgacggcttatgctcgctcgtggagatcttcagcaattctcccgttccgttcagcggatatttgtacagcaaagaagtcagccggcggaaagcgtgcttccggtaatgcgctgaggcgataccctttccggtatttgccgacagcaccaccgtacgcgggcggccgttggacattccgtccgtcccttcgatgacggcgagatgttttccctccttcaggcgtgtcccgtaatagcggttgaaatcatctatcgtcagttctgatgcggcgcgcctcagccaaaacacgtaagtcccgcctgacggaatgacggtatcttctttcggcctccatatcatgtctgattccggcccttccttcggatagcggtagcggatgtgatagtctttaaaatgaatgggcctgtccgtcgtgttatacacctcgataaattcataggcatcagcgccgtcttcatttttcgtatcaaccgcaagctccgtaatcatcagctcgggaatatgattcaaatcggcttgatagccgtccagcttcagccgctttttctccgattccgcccgctgtctgccgttggtgaaaacgaggtaatattccaattctccattccagatatcccgttttgaaacctgggccgtaaacagccggattgcgcctggcgcgggctccatcggcaccattttaaaccccagctcattgctttgtttataaaaaagaaacgccgaaaacgcttgatagtcagcattccgtacatgagcctgtatgaacaggtttcttttcatttccgcctttacttcgatttggggaggattctccagaagcggtatgtaatgaggcggctgtccgaattcctgctgattcacggggattgccgattctttgcgcgccgcatccgcagaaggactcacacaaagcaaaccaatcagaaaaaagagcgtcatcacaagtttcatctcattacctccctatacattatgttgcgtcaggaggctgccgcttatgtaaatcacacataaaaaagctgccctctcgggacagctcgttttttacctttttctaagcggctccaatatgcctttttggatcagcaagtggaaaacggacagcacgacggatgcccaaatggcggtgccgaacccatcaatctgaaagctgtctcccatcaaggctgcggtcatcattaacgtaatggcgttgatgacaaacagaaagaggccgagggtcacaaccgtgacgggcaatgtcaatatgacgatgatcggcttgatcagtacatttaacacagaaagaatcacactggcgatgacagccgctccgatactgctgatatggacggaatcaaaatatcccgcgataacgattaataataaagcatttactaaaatgctgactgcccatttgatcatttatttcaaatctccttctaaaggtacaacaaaacaccagataatatatacaataggcacgattccgctcgtgacaagcgctaatacaacggtgataatgcgtaaaagcgacgcatccatattgacgtactccgccaaaccgccgacgacgccggcgattttacggtttttttctgaacgataaagtcttttcatccaatcacctctgagtatgcttgagcttgatggctcctgttaacgattctgagaaaatcgagagatgctgatcatggccttgatttgatgccagcatcagttctttttgaatggtatcattcttttcctttaaaatttccgcatcaatcagctcatggctgagagagccgagattgcttttcagctccgctttcaccgccgaatcatcaggcagagcgatatccacgtttccggtcgtcgttttcgtgtagatggagcggcagtgcggcgctgtcacggtaagcatgatattgccgttaaagctttgaacgtcaatggattcactcgatccgcgcaaatcaatcaagccgttgatcgtttccgcttcaatcgcgccgcattgatgtccggccagcttgatttgtccgttagccgtttccgccgacgctttatcagccgtcaaatgagagaatgacagaacgccgtttgtcgttttcgccgagaattcttttacatgtaaatgttcccctctgatcggtccgttaaacagcttcactcttatcttatcgtactctttctggggaacataaagcgtgacattggttttcatcgttttcttttccgtgcggacaaaaaacttattgcccttcacttcacactcaatgtgctgaagaaatgcggtgcgcgccgcctcctgactgtccgcccggtacactttcgcctggcactccgctctgatatcttcatccgcccacggcacgatattgacgctgccgtttgcgatctgcatatcaatggccgagaattcactgtctttaaattgaaaaatatgctgcacttcgtgtgcgtggccgaaattcagatcaagatccgcttccttcacttttttgactgcagaatcaatccagtcgaacagcttcgccccgagcgacggcttttggcttccttttgccccgctttcgaaatcttccgcaggttcctggacctccgcagataatgcggtgatctgctcttctttttctttatattcatgatccagtttttcaatgagcgtcagtgcttcctgcgccgtcagcatgccgtcttccacaagctttaaaatccgttctttctcctgtttcatacaaaactcctcccccgacttttcttacacctggcgtaacaccttaatcccctgcacgatattccaaatgaccattccgatgaggatcagaaaataaacagctgctcctgttatcataacaaaaacgggcaccatactctccccctgagccgtaatcaatccgccgacaacacccgcggtcacaatcagcaatcccgcaaacggaatgatatgggaaatcagagcgcgcatggcatgccgcttcgtctctttttcatcgacgacaaagtaagccacaatcggaagaatgagcggcgcgagaaacacgctgaaataacagattgatgcgataatcgcttgatttcggttcaataaaaacactccctgtgccttgatgtaaaaacccttccttatacatacgtatgacgaatgggcgggtttcattttcatgctaaggacatgcttcgttatacgtaatttttgatttcagagatttcactatagaatcttttccccgaaccgattacaatatgtaacaaagcctgaccgtatgcaaggaggacatacaaatggagaaagatcccgaaaacgcccaagtaatggaagagagtctgcgaaatttaattcgcgaacagaaaagaatgaacagcgaaatgctggctgaattggaacagatcaaagcagcccctcttcccatttcccatgatatccaatatataaaagtgctgctggacagcagcagcacccatattctgcaggacttaatgcatttaagcaaacagcttccccaacagaaaaaagcctgtaacacaacagcccaaaaccggtgagttttgggctgtttttattgatctattatgtggctgccgtttctttttcagccagcaatgttttcatccgttttttatcacgttccattaccggtttcagatagcggcccgtatatgattctttcacttcgacaacttcttcaggcgtcccggaggctacgatcgtgccgccgcccgctccgccttcaggtcccaggtctacgatgtagtccgccgttttaatgatgtcgagattgtgttcaatgaccaaaacggtatcaccgttatcgacgagtctttgaagcacaaccaatagccttgcgatatcatcaacgtggaggcctgtcgtcggttcgtccagaatatacagcgtccggcctgtggaacgcttatgcaattcggaagcaagcttgacgcgctgcgcttctccgcctgacagcgtcgttgccggctgaccgagcgtcacatacccgagtccgacatcggcaagcgtttgaagcttgcgtttgattttcgggatattttcaaagaaagacagagcatcttccaccgtcatatccagaacgtcagaaatgctttttcctttgtatgtgacctccagcgtctcccggttgtaacgtttgccgtggcacacttcacacggaacgtacacgtcaggaaggaagtgcatctcaattttgatgatgccgtcgccgcggcaggcctcacagcgcccgccttttacattaaaactgaaccggccttttttatagccgcgcacctttgcttcatttgtctgcgcgaatacatcgcggatatcatcaaacacgcccgtataagttgccggatttgatctcggtgtccggccgatcggcgcctggtcgatgtcgatcaccttatcaaggtggtcaaggcctttgatttctttatggcttcccggtttcgctttggctttatgaagcttttgcgcaagcgccttatgcagaatttcattcacaagcgtgctttttccggaaccggacacacctgtcaccgccgtaaaagtgccgagcgggaatttggcgttcgcttttttcaggttgttttctgaagcgcctttgatttcaatgaaccggccgtcaggctttcttctctccggaggcatcgggatgaattgagcccctgacaaatagcgtccggtcagagagtccgcatcattcatcacttcttcaggcgtccccgccgatatgacgcggccgccgtgaatgccggcgcccggaccgatatctatcaaataatcggcagccatcatcgtatcctcatcatgctccacgacaatcagtgtgttgccgagatccctcatgtttttcagcgcgctgatcagacggtcattgtcacgctggtgaaggccgatggacggctcatcaagaatatacaggacgcctgacaaacgggagccgatctgcgtcgcaagcctgatgcgctgggcttctccgcctgacagcgttcccgccgcccggctcagcgtcaggtaatcaagaccgactttatctaagaagctgagccgttccacaatctctcttaaaattaaatcggcaatctgcatatctttctcagacagcgtcaggtttttgaaaaattccagcgcatcgccgacggaaagctccgtaatggtcccgatatgacgcccgttgaccagaacggcaagcgcttctttcttcagccggtagcctttgcacgtcgggcacgatttctgtgacatgtactgctccatctgttcacggatataatcggagcttgtctctttataccgtctctcaatattacgcagcacaccttcaaattcaatttcattttcgcgcacttgtccgaaatcattctcgtatttaaagtaaatccgttcattgccgctgccgtacagcactttatcaagctgatgcttcggcaggtctttgaccggagtctccatatcaatgccgtaatggcggcagaccgcctgaagcagctgcggataatattgtgaactgatcggcgtccacggcgcgatggcgtgttcctttaatgacagctcgggattggggatgacgagctcagggtccacttccagcttcaaaccgagaccgtcgcaagtcggacaggcgccgaacgggctgttaaacgaaaacagccggggttcaagctctccgatagaaaaaccgcacagcggacaggcgtgatgctcgctgaacatcagctcctcctgaccgatgacatctatcatgacacggccttcccctaagcggagcgcggtttccagcgagtcggaaagccgggcggcaaccccttccttgacaacgatccggtcaatgacgacttcaatggaatgctttttgtttttttcaagttcaatatcgtcggaaagctcggccatttctccgtcaatccgcacccttacgtaaccttgctttctgatttggtcaagcactttgacatgggcgccttttctgcctgagatgatcggcgcaagcacttgaagcttcgtccgctcaggatattcaagaatccggtcaaccatctgttcaatcgtttgcgacgtaatttcaatgccgtgctccgggcagtgcggtttcccgactctcgcgtacagcagccggagataatcataaatctccgttaccgttccgacggttgaccgcggattgcggcttgtcgttttctggtcaatgctgatcgccggagaaagcccttcgatcgcatcaacgtccggcttatccatctgccctaaaaattggcgcgcataggcagaaagcgattcaacataccgcctctgtccttccgcgtaaatggtgtcaaaggcaagggatgattttcccgatccggacagccccgtcacgacgacgagctgatcccgcggaatcgttacatcaatgttttttaaattgtgcgcccttgcgcctttcacctcgatccggtcaattgccatgtgttcatcatccttccgctttaagctctaacagtaaatcacgaagctctgccgcccgctcgaaatcaagcgctctggccgcttctttcatttcgtgctccatttgctcaacgactttctggcgttctttcttcgtcatcttcgccagtttaggcgcggcttttgttttatattcttctttatcctcagcggcctgcgtcgcgcggatcacatcgcggatttccttattgatcgtttgcggcgtaatgccgtgaatttcgttaaagcgttcctgctgttcccggcggcgcttcgtttcattaatcgcgatctccatcgaattcgtgattttatcggcatacatgatgacgcggccttccgcgtttcgtgccgcccgtccgatcgtctgaatcagcgaacgttcagaacggaggaagccttctttatccgcatcgagaatggcgacaagtgacacttccggaatatcaagcccttccctcagcaggttgatgccgattaacacatcatgttttccgaggcggaggtcacggatgatttcaatccgttcaagcgtcttaatctcggaatgcagataattgaccttgataccgatttccttgagataatcggtcagatcctctgacatttttttcgttaaagtcgtcacgagaacgcgttcattccgttcaatcctcgcctgtatctcgccgatcagatcgtcaatctgtccttcgatcggacggacgtcaatgaggggatcgaggagtcccgtcggtctgatgatctgctcgatcatttccggcgtatgctcaatttcatacggtcccggagtcgccgacacgtacacgatattgtgcatgtgtttctcaaattcctcgaatcggagcggacggttgtcaagcgctgacggcaggcggaacccgtgatcgacaagcacctgttttctcgcctggtcaccgttgaacatgccgcgcacctgcggaatcgtcacatgtgattcatcaacgacaatcataaaatcgtccggaaaataatcaagcagcgtatatggcgtagagcccggcggacggagtgtcaaatgtcttgaatagttctcgatccctgagcaaaaacccatttcccgcatcatttcaagatcatatctcgtccgctgctcaagccgctgcgcttcaaggagcttgccgttttcgtgcatcactttcaagcgctcctcaagctcctgttcaatattcagaatcgctttttccatcttttccgcccgggtgacgaagtgggaagccgggaaaatcgcgacatggtcacggtcgccgagaatttctcctgtcaaagcgtcgacctctctgatccgctcaatttcatctccgaaaaattccactctgatacaatgttcgtcacgggaagccgggaagatttccacaacgtctccgcgcacgcggaacgtcccgcgctgaaagtcgatatcattgcgggcatactggatatccacaagctttctcagcagctcgttccgctcaatttccatttccggtctgagcgacacaaccatctcccggtattcttcaggcgaaccgagaccgtatatgcatgacacactcgcgataataatgacatctctccgttcaaacagagaggatgtcgcggagtgtctcagtttatcaatttcatcattaatgcttgcgtctttctctataaaagtatccgtttgaggcacgtacgcctccggctgatagtaatcgtaatagctgacaaaatattcgacagcgttgttcgggaaaaactccttaaactcgctgtacagctgtccggcaagggttttgttatgggcaatgaccagtgtcggtttattcacttctttaatcagattggacacggtaaaggttttgcccgtccctgtcgcacccaggagagtctggtgttttctgccttcctgtattcctttgacaagcttctcaatcgcttgcggctgatctccctggggctgatatttcgagactaactcaaaacgatctttcacaaaaaagcctccgtttctttacgaaatcttcctattgatatagtaacacaatgacgggcaaaatcactaaaaatacgaactaaagttcgatggtttatttttaccaagtcaatttttgtataaaaaacctgcttttatggcgtaaaagcaggcattctatttcatattcaccatgtcaggcattgtctttctttttgtctgcttcttttttggccatgtacagccctccggccaccagcgatacgacatccaatccaacgataaaatacgtttcggtgtaaccctttaaataggatgcgaaaagcagtgcggctgtgagagcgatcgccacatagtggttaaacgtgacgcgcgtaaaaaggacgaccagcataaaagggaaacataatgcaaaaacggcttttgtaatcacaaaaaccctcctcgggaattcttcatctcatctgattatagtaaaaaatgaagaatcggacaatcgttcccctgctatcacaataccctttttcagcagtcttcaatcatctgtcaaaaaaattgtgaatataaatccattgaaccattaaccagatgaatcgaattacctttcttcagccgaaaggatgagaaggtttaggtctttgtatctttgacagtttcttcctccctctttacaatgtaatgatagtgtttactatcattttcttggatgaagaaaaaaagggggtcataccgcatgtattcagtgcgatttcaaaaagcggaagaatcgagccgctctgcaggagcaaaaggaatgaacctgattaaactgacgaaaaacgggctgcccgttcccggcggttttatcattcagacgaatgccctgacacgttttatggaagacaacgggcttcaagcagatcaggaacagatggagcgcgccattatgaacggcacgttttcaaaagagcttcgggaggaactgaccgcgtcgttttatgaattgagagaatcatacgcctctgtcgccgtacgttcctcctccgcgtccgaagatcttgaaggggcttctttcgcaggccagtacgaaacctatttaaatatcaaaacagaagaagagtttctcggaaaagtgaaagaatgctgggcttccttcttctcggcgcgggtcagcggctataaagagaaaatgaacaatgacaccgcagaaccgttaatgggcgttgtcgtgcaagggctgatcaattccgaggtttcaggagtcattttcagccgcaaccccgtcacacacgatgacggagaactgatgatcagcgcgagctacggtctcggagaagcaatcgtctccggcagcgtgacgcccgacacatttatcgtcaataaagatacatttcagattgaaaaagaaatcggcttaaaagaaatgtatatcgtttctaaagacgaaggcgtgacggaaaaagagacgaccgctgacatgagaagccgcttctgccttgatgacgagagcatcaaagagcttgccatgctgacgataaagacggaagaactgtacggttatcccgtggatcttgaattcggatttgccgaaaataagctgtatctgcttcaggccaggccgattacaacgatcgtgcaggatcagaaagcggcagacgaagaacgggaatttatcatgacgccccgggatcagaaagatttttggctcaatatggaggccaatatagaaggccccgtcagcccgttattcgcctcactcattgtgccggctttggaatacggcctcaaagagagcacgaaggcattccctgtaatgggcatcgaaatcgagcgtgtcaaacttcatcagggccgtgttttttccagacagcataagacggacgacaagctgcctgcagaacagttagaagcgcttttccccgtcttgactgaccgcatgtacgatattattcaggaaacctttctgcctttttatcaaaagctggacgaactggcgcatacagaccatacgccggagactgcccttgatgcgttccgaaacctgcaagacttctatttaaaaggatacgcagaacatttcaatattgtctttccgcaggttgcgttaaacatgatactggaatccatgtacggacaggttgagaaagaaaacacatcccttctgtacgaaatgctggctggcgtcatgaataagtcattggagaccgacagacagctctggctgctttccggacaagtaaaagacagccctgagctgcggcgcgtctttacggtttctcatgccgatgagctgcatcagacgcttctgcaatcaaatgagggaaaacgctttctcgaacaagtcggtgaatttttacaggaatacggctggagatctgtgaaaagtcatgatctcattgaagaaacttgggcggaaaacccttatttcgctttggccaacattcagaactatgtccggaacggatacgattttgacagtgagtttcataaaacgatagaaaaacgaaaacagctctacgccgactttatggatagaattgaagatgacggcttccgggagacgtttgaccgctattatcagtggacattgtcttcatccgtcatcaaagatgatcaccatttttatattgatgcgatgctggacgccaaagcgcgcctttgccttctgaaaatcggcgagctgcttcaaaaacaaggcgtaatcgatgatcgggaggatatgtggtacttgtacagcgatgaagtcgagaaagcgctcgtgtcgccggttccgatgcaggaaaaagccgctgaacgaaaacagctcttccagcaatatcaattgcttgaagcccccgcttatctcgggactccgacttcggaacagctgaaaacggctgaacagattaccggctccatcacagaagatgaaaaaaacactgaacatcaaatttacggacttgcggcgtcaagcggaatcgcaagcggcccggtgaaagtcattcgtgacgcaagtgaattttcccgtttttcaacaggagacgtgcttgtctgcaaaatgacgacaccgctgtggaccagtctgttccaggatgcaaaggccgtcattacggacacgggcggcatcctgtcacatgcggcgatcatcgcgagggaatacgggcttccggccgttctcggcacacgtgccgcgactgacaggctcaacgacggagatatcgtcacggtggacgggacaaacggcaagattacgattgtcaaacgcgcttcatgctaggtttccctctttattgacgggcagggcgggtgtatacttgtcctgccagtatttacgcgaggtgaaacatgttgagaacgacgaacaagagaattattgacgccgcgatgaatctgatcatccaaaaaggataccgcgcagcgacaacaaaagaaatcgcagaaaaagcaaaagtaagcgaagcaacgattttccgtaattttaaaaacaaacaaggattaatgaaagccatgattgaacagcagacgccggttccggaaagcatgatcactaaggcggaaggcgatctgtatgaggatcttcttcatttcgcggagacccttcttcagcaattggaacaaaaaaaagaagtgttccgcatctgcctgcgcgaaccggaactgttcgaagacgtcctgcaggatattgtcgtatatccgcaatccgtgaaaaagcatttaatcgtttactttaaggagctgacaaagaaaaatatgataagccccggcagcgaagaagctaatgcagacgtctttatgacgatgattttcggttattttatacaccggctgcagctggggaaaagagtcatcactctctctgaggaaacgatgctgaaacacagcactgagattttcatgaaaggcattaccggccggtcattttccggctccaaggaggatgaaggatgggttcaaagaaagaatgggcgctgatcgtttcgcttttgctgggagccatactcgttcccatcaattctacgatgatcgcagtcgccctttcatccatttcccgctcattcagcgaatcaattgccagcatcacatgggtagtgaccgtgtatttaatcgtgatggccgtgacacagcccattgccggcaaactcggtgatatgtacggaaacaaaaaaatgtatttatggggcgtcggcctttttctcatcgcatcattggggtgcgccctctcgccaagtcttttcttattgattttcttccgggcgcttcaggctgccggcggcgctttgcttacgccaaacagcatcgccatcatccgccatgtcgtgtctgaaaaacggcttccgaaagtattcggctttttcggcctcggtgccgggctgggtgcggctctcggtccgtttatcggctctcttttaattgagagcttcagctggcattcgatcttttgggtcaacattccgtttcttgcaatcgcacttgtgacggcattagtgatgtttcctaaatataaagaagaaacgtctgacgctccgcttgatatcatcgggtccgttttgcttgccggaagcattgtatctattattcttctgacgaaaaatgaaagctctttgggctattgggtgtacgcactgctcattctcgtatttgttccgctatttttcaggcgggagctgcgcacgaaacatccgattattgattttgacctgtttaaaaacacgacctttacgagcgccaatctgtcggttctgttaagcaatttaatgatgtacgccctgttattgattatgccgctctttatgaccggccacttcagcatgaacacgtcgcacagcggcatggcgctgtcagtcttttctgttttcatgtccgccagcaactggggcggagctcagctgcatcagaaatggggcgcgcgaagaatgatttttctgtccttcgggctgatggccgtagccaatctcttatttttgcttttggtttattcccattccgttccgtttcttatggcatcgcttatagtcggaggcatcgcgtcaggtgcggggctgacgagcatgcaggtatcttcccttgcgacggtagaaccgggcatgtccggcatcgcatccgggattttctccaccttccgttatttcggaagcattatttcttcagcgctgatcggtttaatctccgggtttcatattctgtttatcatattgatcggagtttctgtgatcggcttgttcgtatcgcttggtatcaagtccggggaaaccgttcagacgaaaaaaagccattcggcataacgaaaaaggttccgtaagcatctgctttccggaaccttttctagttttccttcttcattttctctctcaaagtgtcaccgcaatgccgtttgctctatgagaatcttttgatttacaagagaaaaggtgaatgtaaatggctgagagctcagatcaagttcggccgcttgcgccgtaatccggccgtaaaaaaagcccggccgccgtgttgttagcggcaccaggctttttatatgtgatttttcataattaataaaactgaaagcttattatttccaatgttttttcttaatttttttcataattctccttactaaaacctacctaaaacaattattgaatattacttttataattaagcaaaattaagtaacaatcattgaaggattctcagactgataaaatttattttaaatataatatttcaaaacacattgatcctccttctaaagttgagtcgcgtcactttagtagaatcataccgtggcttcccttgtcaaaaggcacagttcttttttacaccactacttgagactttaacgtttctctcatttgaattaattcaaaatagaattaatgggggagattacccccgtatttccaggcgatccaggtgggtggcctggtaaatattttgagtctctgtatctttaacaatagtatttacaatatcattaggataccgattcaaaaaaaaatgttctcctttaaacttatgaaatttcacgtttccttcaacaacttcactccatttatgcatttcattgatatgagtcgaaaaatcgctatccgcataaaaaacgcttactccacaacttattttttctgctttgggctgaaacttataattgtccaaaattataaaatctgctcgcaaaatcggaagaaacatatccataatctcttttgtataaaactcctctggtattcccccatattgttccacctttgtcaagaaagtttcattagtcatattttcaatgtcttctctcttttcaaaaatatgtggagcatctcgcccagaaaaaaacagatgccttggttccttagttcccatttgcttaagtttataatatatctcataagtcaataaggctcccatgctgtgtccaaatataacatattcatcgtcatattctaattgttcacttattcttttggcgatatcttcacttgcttcaccaacagactggtaacaaggctctgtgaatcgagttcctcttccagccaattcacatatacacaattcatatctatccggcagtagttttttccattcataatatgcatttaccgacgctccagcatatggaataggaaatacttttattttatttatttcactcactcctatgttcaacttgagcccactatcattactatataaacctataagtattcaagatacatttaattgtacttctctatctctcgctgctctgccagcaacaaattcaccatatcactatagctattcaaaccgtctgtctgattatttgccttcagatatacgtcatttgcatttcttgaaatacttgaaataacaccctcatacttatcccggtactgctcattttgttctatatcatgccgcaccgctttggacagactggacattatatcagacgccttatctggatccactttctttagctcagatatagaataatcaaatgccagaaataaaccactgtatagtatcattggatcatcctgctgcttacatgccagataagctataaaattagcctcatcctcatgcatgaaaccactctgatgtgccaattcatgcgccatagtagcaggcaccaaaaaaactggcacattaacattgatattggattcataagtaaaagggacaaaaataccatgtatccctgcatgcgacattagttttgacatcaccactggttttggtgttgaatatgaatgctccaaaacaggatatttctttgataacatttgcatcgagaacactgcgtgttgtgcataataatcaaaaacctctggtacatgagccaaaagatcagtatccgctaacttttcccttgccaattccatttcaacggcaagtgacttactcaatttaaccagttcttccttgctgtagttctcttctttatattcggtatgagacaaaaaagaatatctgtgatagtttattccacccaaaatagtataacaaaaatatatcacgctacagatcgtaacgattcctagagcaccacgataaactaccatcctacgtgcacctttactcatgatgaccttgcgcacataataaacgatataaaatagaaatagtaacacaaccaacacgacgagccattcactaacagaaaatgtgacccaagaaggtacaagtcctactgtttttgacaataacggatatacagacctactgtatttctccgcccaatcctgatggttctgcgcgtattttgtcagtatataagctataactccaagtgagatcaacggtaatctcttaagtaaaagcttttttataatgtactccccctatccaacataaccattataatcagttattcttaatatatatcctgctaaagattcatcttctaaaggttttggagttagcaataacctttccaataagccatacctctccttcatttatttttttattatttcaaaataaaacagctaagaaaatataattttcttagctgttttattttgaaatctagtttaggagttcttgaaactattccgaataattatgaaaaatcacattataatgctgtcatttcttcgtgctcgtgttcatcctgcacgaataaaatacctaattcatgatgttcgccttcataggacgcgcgctgatcaaaccggatctcaccgttcaggccgatgatctccatttttacaaatgcgcggtttttttgaagtgcttcataaaaatccgacacatgcttcacggggatgccgtttactttcgtaataatctcaccgatcttcagctcaagatcgtccgcgggtgtattcggaatgatgccgagcaccattaagccctgatcccgcttagagaaataaaacggagccgcgttatcgttcagccgctgtcttaatgataaaaacaggcgtccgagcaccgcaatacaagcggcagctccggcaagcggagtccaccaaagggccgctgccccgaatgcggtcacgataaccccgagaatcatgacacgtttcgccgttatccttatgctgacttccggaagtgacccctgcacacgctgtccgaagccggcgatataaggaatccagatcaaatggaaagagccgcccggcacggtaaagacaggccaccaagaaaggtgtgactcaagcccgctgcccggcaccaataagaaaagcggaagcagccatgcgcgattcgccaattgacggccgatgggcaggcctctgctgctgacgacaagcgccggagatgttttcagatgcgctgaacggcaggcagccgctccctccgtgataatcaaaaggcccataaacacggccgccgatgcccaattcacgccgaatgcctgcggaaaccgatccgcaaacggcactgtgtgggtatactgaaggagaaacgcaatgaacatgccggcgctgacaatataagctgaggacagccaattcatacggaacgtcagcgaagctaaagccgtcacggccgcgattatgccgagaagaccgaatggaatcgaaattcccagtccaaaaaataatatggagagaagaatacccggtataagtccttttatgtatgtaaagataagctcgtcatacatatctgcgatttttgtatgaaacgtatggcgttcacgtttaatccgcaaatatccgcaggcgagacttatgatgataaaaaaccaaaacatcgggtgcaaaaaaaacagaccgatacttttcagaagttcaattccccattgaacagacattgctttcaccgcctcaagccaaacattttaattctattctaccaaataatcattggcttgaatatctcaaacgtctatctctcttccgtcatccacaacgtcacattcgagagagagaaatctttcagatagtggtcgacttccacctcgattacaccgctgatcaaaagcatggaccgtttaatatccgtcagattgattcctaaacgtttatggtttttcattaagtaggtgaaataatgctttgcacactcctcattgatatcgtgaacacattcaacatttgtgtaattgaccaggtatctgctgaacagcataagaagacttagtgcttttgttgatgaaaatgtaacgtcttttgttcggtcttttagttgttccactaattcataatattttttttcacgcacaatacttgccctcttcaattgtgaacccccatttttttatccagataagcacgggtgattacagctgccgtgctgaagcgccgcaaacacttctgctttcgatactgaaatgcagctgccaaactaaaactgttctctattagaaccttcttttattgtaagaactaaaactgactgaggcaactttcaaaagtttcattttgaatacatattaactcggcataaagtctctcttctctataaatatcgggtaatgtttgtcctttataaatgtttaaatgtgaaaatttttttaatatcttgtcaaaaccgacataattatatgtcttttagttcatttttagagtgtgacaaaagaaacaggagacgtaaaaaacgcctccttttcatttattttacaaataatgattttaacgccatttgcagctgtaaatcatttttttcgtcagatttctgttcattcatcagctgattcattttttccgctgtctttttatcaatgaccgctgttttatcaagtttgtaccggtcttgaaacgccagaacggcttttttcattgttttgctgaaatagccgtctgctctgcccgggtcgaagcctaggcctttcagcaggatttgggcgtgtttgacatccgcgctgttcatatcaggctgaagcggctgtttcagctgaagcggtcccgccgcaaaataatccggctggctcacagcgattgtcggagcaatgccttttttgtggatccaattgcctttcggtgtcagccatttgtaaagcgtcaatttaatgttgctcccgtctcccataggcacggcctgctgaaccgttcctttaccgaaagaagtgtcaccgacaacgtcataatgtcccgcttcttttaacgcacccgcaagaatttctgaagcggaggcgcttcctttatccgtgatgacattgacgggatacggcttcttatgttttaaggttgagaaatattgttttttatcgccgttacgctccgcaatttggatatacggcatgtcttttgtgatgaaatgctttaaaatttgttcaacgctttgaaggtagccgccgggattccctcttacatcaaggacgagaccgtcaatcccttgtttttcaagctttttcagcgccgcggcgaagtcctgggcggtatgctcggaaaatgtcgatattccgatgtagccgacatgatgaccgcctgattctttgcgggaagcaaatacggtttcaagcgggatttccgctcttttaatccggaatgacagctgtttatcagtacccggacgctgtattttaatagaaaccttcgatcctttttttcctctgattttcagcacggcttcgtttaaacctttcccgttcattgactcgccgtttatgctgatgatttcatcattcggcttgagtcccgctttttccgccggagattgcttaaacggtgatacgataatgattttattgtcctccataccgacttcagcgccgatcccttcgaaagaagaatcaagagaatcggaaaactgcttagcagtctgcttgtccatataaacggaataagggtcgtttaatgtagacagcatcccctgaatcgctccttcaagaagcttttctttatctacattttccacgtattcgttcgagatcagctcatatgctttttcgattttttccattgcccggcttctttctgcgtctgatgaattcggctgtactgccccggcaatatgagctccgccgcacatgatgctgacggctgctatcactgcgatcattttctgcttcatcgtttacctcctcttagtccttttacgaaaacctggagatagtatgtgtaaattgcaaagaattcatgtaacggcaacaaaaaaatgaaaacgcgagattgttacatatatatgggtaacgtataatattttgtatgcaattcattaaatatacaggagaatgcgatatgaaaataaaattatcgattttatccgcggcggttctggccgcaggcattaccgcctttgtctggcaaagaacagaggccaatgaaaaaatgcagacggacgccctgtatgtttctcccgcaggcagcgaccaaaatgaaggaacgaaagaaaagccgttccgcacattaaaacatgcggctgaaaaggcagaggccggaacaaccgtattgattcgggaagggacgtacgatgaaacgtttgaagtaaagcatagcggcacggccgaaaagccgattacatttcggaactatcagaatgagcatgtctcaatcagcggcaaatctgcgccaaaaagcgattctgaaactccgttaattcaaatccgcaataaacagtacattaccattcacggcgttacgcttgagaatctctccgtatcatcagaagatgcgacggccatggggatctgcgtcaccggatcaagcagtcatatcaacattgacggcaaccatatccgaaacattaaaaccacggctgatgagggaaatgcacacggtatcgcgttttacggcacaggcgccatgaaggatgtcagcatcacaaataatacggttgaaaaactgacgctcggcgcaagcgaagcggtcgtgctgaacgggaatgttgacggatttaagattgccggcaataccatccgggacaataacaatatcgggattgacgtgatcggatacgaaggaacgtccaagcaaaacgactatgcgcgaaacggcgtcattgaaaacaatacggtgagccataactcttcttacggaaatcccgcttacggagatgaatattcagcgggcggtatttacgttgacggcgcagaacatgtggacattaagaagaacaccgtttacaacaatgatcttgggattgaagccacctctgagcataaagggaaatacgcacgagatatccggattacggataacaaggtgtacggcaatgcttacaccggtatttcaatcggaggctatgacacgaaacgcggcggcaccatcaattcggtgatcgctcataacattatgtatcgaaatgacacgaaggaccttgacggcggccagctgctgctgcagtacggcacaaaagggaacacgatcgaaaaaaacatcatgacggcaagcggttcacggatttttatcgcaaatgattatacgaaaaacgaaggcaataccgttaatcataacgtctatcacaaagaagcgggaaaagacggcatttggaattggaagaacagagaatatgattcattcacagcgtaccaaaaaggaacggcaaacgattcggattccatttatgcggacccgctgtaccgtgacgaatcgtcttatgactttacattaaagcccggatcaccggcccttcccgtcattcagtaacgaaaccattaaaaaaagccagtctatatcagactggcttttgtatttatacacgaaggaatttccggatggaagtcagacttccccatactccgataactgcgccgatcagaatgagcacaagtgatacttggaacacaaacggactgtacggcagaagtgaaacaaatgagccctgaactttcggggccacccaagcgaccatcgattggtacgtactcagcacgagagcgatcggtatgatagaaccgaatacccccagcagcagcccttccaggaagaacggccagcggataaaccagtttgtcgcgccgacaagcttcatgatttcaatctcttttcttctggcgaaaatcgtgattttaatcgtatttgaaattaagaacatcgccgtgaacagaaggccgatgattaacgcaatcccgatgttgcgtgacaccccgacgatcttaaacagacggctgacttcttctttcccgtatgtcactttatacacatgatcaagcttctcaatttttttcgcgactttcggcgtatcatgcggatctgtcgttttgacgataaacgcgttgttcagcgggttttcctgatcttgcattttcatggcctttccgctgtcgccgaagcttttgaccaattgatcaagctctttatctttagatgaaaactctacgctttggattcccgagatgtctttaatctcattctgcagcgtatcctgcgttttcttattagacgtcagatcgattaatactttaatttccacttctttttcagcatttttagccatgttgtttaaattcagcataatgactaaaaacacgccgaccaaaatcaatgtaacggtaacggcgctgatggatgcaaatgtcatccatgtgtttcttccgagagatttaaaactctcacgcaaatggcgcccgagaattttaatcataagaaccatactcccctcttgactcatcacgcacaataattccgtcttcgatcgcgatgacccgtttcttcatggtgtttactatttctttattgtgtgtcgccatcacgacggtcgttccgcggttgttaatatcttccagcgtcttcatgacttcccatgatgttaccggatcaaggttgcccgtcggttcgtcagctatcacgacgtcaggattgttaacgatggatcttgcgatggaaacacgctgctgttctcctccggaaagctggtcgggaaactgccgcgctttatgcttcagctgcacaagatcgagcacttcgagcacgcgttttttaatgactgactgctgctctccgatcacctcaagcgcgaacgcgacgttttcaaataccgtcagtttcggaagaagtttgaaatcctggaaaacaacgcctattttgcgccgcacgaaaggaatctctttttcttttacagacgcgagatctttatgattaatcaatatttgcccttttgtcggtttttcttctctgtaaatcattttaataaaagtagatttaccggctccgctcggtcctacgacatatacaaattctccgggatgaatcatgactgacagcccgttaatcgcttttacaccgttcggataggatttatatacttctttcatctctatcatgaaatcacctaatcttttaattatgtcttgcagccatagagttcgtaaaaatactgcggtttatggccgatttaccaggaaacagatgaaaaatctgaaagttccttttcctcagtacacttcattatacgtcaaatttagacatattactattacagtttcttttcattcccagaccgtgaaaaaaccttgcccctataacaggcaaggtttttctgttattttttctgtgacagccattttgcgatcttcgcggcttcctcatcatttacaagatggctcggcatattgccgcgtccgtttttaatgatgctttcaattttagcttcatcatacttcccgccgacttcctgtaaattcgggcctccgccgccttctaagtcttttccgtgacagccgatacagctttgctgataaagctcttctcctgctgacgcagatgcttttgatccgcctgagctgtcagagctttcttttttcgattcattggatccgccgcatgccgccagcaggacggacatggtcagaaccagcgccagcagcgcccattttgatttcatatgtaagatgcaccccttcgctattataaccccgtttacgcgcgtttgaaaccctcgccgagcacctcgcttgcgtctgcgacaatgacaaaggctgactcatcaatttgtttgacgatttgtttcagttttgtgaattcggtctggccgacgacacacattaagatcggccggtcatgttccgtatacccgccgactgcggaaatcttcgtcacgcccctgtcgatttctttaaacacggccgatctgacggcttcttcatgctgcgtaatgattaaagccattttggagcggttgaacccgacctgcacgacatcaatcgttttgcttgaaataaataccccgagcatcgcatacagtccctgctccactccgaaaacgagcatcgcgctcagcacaattaatccgtccatgatggcaaggcacgttcccagcgacagccccgtgtatttgtgaatgatctgccccgccagagccgttccccccgtggagcctttgccaagatacacgatgccgattcccgttccgatcccgacgcctccgaaaatcgccgccagcagttcatgggtcgtcgcggcaggcagatctcttgttaaatagacggcgagcggcagaacgatggaaccgaccagtgtcttcattccgaacttcccgccgagaatgatcactccggcgataaacaaagggatgttaataatccactgcacgtaagccggttcaaaaccaaacgtttctaaaatggtgctgatcccgcttactccccccgctgctatacggttcggcagcaaaaatacgttaaacacgatccccgtaatcgccgcgccgatcatgatgtatatataatctttgatcagacggagcggcttattgtgattcacatccatgcaaaatcctccgttctccgattttctctcgatagcattttaagtcttcccggcttagaagtaaataacagccaaataccgtattaatttgctaaagcgctgttgtgaaaaatggaaaaagagaacggataaaaaaacacaccttgccaaaggcaggtgtgttcccggattacgacagtttagaacgtaaataggcgtcaatgaagatatcgatatctccgtccataaccgcctgcacgttccccatttccgtattggtgcggtgatctttcaccatggagtacggatggaagacgtacgagcggatttggctgccccagccgatttctttctgttcgccgcggatttcgtcaagctccgcctgctgttcttcaattctgcgctgatacagcttcgctttgagcattttcatcgcccggtcgcggtttttgatttgtgaacgttccgtctggcacgtgacgactacatttgtcgggaggtgggtgatccgaacggctgaatcagtcgtattgacgtgctgtccgccggcaccgctcgcccggtacgtatcaactttaatatcttcggtacgaatatcaatgtcgatttcttcattgaattcaggcatgacttcacatgacacgaatgacgtgtgacggcggcctgatgaatcaaatggagaaatccgcacgagacggtgtacgcctttttccgcttttaagtagccgtatgcattgtggcctttaataagcagtgtgactgacttaattcctgcttcatctcctgggagataatcaagcgtttcaactttgaaaccgcgtctttccgcccagcgggtatacattctgagcagcatggaaccccagtcctgggattccgtaccgccggcccccggatgaagttctaaaatcgcgttatttttgtcgtatggttcactgagcagcagctgaagctcaaattcattcaattccttcgttaatgacttcagctctttctcaagctcttgctgaaggtcctggtcaggttcttcttttaaaagatcatgtgtcatttgcagctcttcgtgagactcgctcagctgatgataggagttcacgtattctttcagaccgttcgcttcattgatgacggtttgggccttctgctggtcattccagaattccggttccgccatcttttcatctaattctgcaatgcgggcttcctttgtttcgaggtcaaagagaccccctgaagtccgctaaacgagaagccatattttcgagctctgccctgatttctgataattccattccattcacctcattaaaagatccggggcgccataagacgcagacccggtcatgttcgcttcatacagtcgagactattctgtccggccgcagcaatttttatatttttttccgctgccgcaatggcaaggcgcgttgcgtccgatatccacaactttgcgcaccggcgcttttttcgcttgtttggcctcatcgccgtcctgcggctgatgagccgtcgtttggccctgaacaacttcttcgcgttccagattgctttcaatctcggccttcatgacgaatttcgcaacttcgtcctcaatggactcaatcatgtgctcaaacattgcgaagccttccatttgatattcacgcagcggatttgtctgcgcataagcgcggaggtgaatcccttgacgcagctgatccatcgcatcaatatgatccatccattttgaatcaacggcacgcaatacgatgactttttcaaattcacgcatctgctctgtgccgaaattctcttctttttcattatattttgtcatgatgcggtccatgatcatctcatgcatttcatccggttcttttccgaagatatcgctcttttcaagtgcgccttcatcaagatacgttgaattcaccagctccacgaggccgtcaagattccattcttccggaagctcctctttcggcgtataagcggcaatcgcacgctccagagaagacttgatcatgccttccacaatgtcacgcaggttttcagagtcaatgacttcaaaacgctgcttgtatatgacttcgcgctgctgacggagcacgtcgtcatattgaagaagctgtttacgtgaatcaaagttgtttccttcgacacgtttttgagatgattccacggcgcgtgacaccattttgctctgaatcggcgtggagtcatccataccgaaccggtcaagcatcgccatcgtccgttcagctccgaaacggcgcatcaattcatcttccattgaaagataaaattgtgtgatgcccgggtctccctgacgtcctgaacgtccgcggagctgattgtcaatccggcgggattcgtggcgttccgtaccgacgactgcaaggccgccaagctcttttacgccttcgccgagtttaatgtcggttccgcgtcccgccatgttggtcgcaatcgtgacagcgcctttttgtcccgcttcttcaataatctgagcttcacgctcatggtttttggcattcagcacctgatgcggaatccctttgtttttcagaagtttagaaatcaattcagacgtttcaacggcaaccgtaccgacaagaaccggctgtccggtcatgtagcgctgggcgacatcctccgccaccgccttgaattttccttccattgagcggtagatcaaatccggacggtcgtcacggatgaccggctggttggtcgggatggatacaacctgcatgttataaatattgcggaattcttcctcttccgtttttgcggtaccggtcataccggccagcttttcgtacatacggaaatagttttggaacgtaatcgtcgccaatgtcatgctttcattttgaatctccaggccttctttcgcctcaattgcctggtgaagaccttcgctgtagcggcgtcctttcatcagacggccggtgaaggaatcaacgatgacgacctggccgtcctcaacaacataatccacgtctttctgcatcgccgcatgggcttttaaagcctggttgatatggtggttcaaggccacgtttttgacatcaaacaggttgtcgatgccgaacgttttttcagccttcgtcattccttcttccgtcagctgaacgcccttcgttttgacgtcatacgtataatcctgatctttcttgagtgtgcggacaaacgcatttgcctgcacgtaaagttttgtggacttctgagcttgtccggaaataatcaatggcgttctcgcttcatcgactaaaattgaatcgacttcatcaataacggcaaaatgaagcgggcgctgtaccatttgttctttatagagcaccatgttgtcacgcaaataatcaaagccgagttcattgttcgttgaatacgtgatatcggctgcgtaagcttcacgcttttcgtcttttgacatcgaattcaggttcaggccgactgtaagcccgagaaacgcaaaaatttctcccatttgctgggcatcacggctcgccagatattcgttgaccgttacgacgtgaacgccttttcccgtcaacgcatttaaatacacaggaagcgtggacgtcagcgttttcccttcccctgttttcatttcggagatgttcccttcatgaagggcgatgccccccatcagctgtactttaaacgggaacatgccggttacgcggcgggaagcttcacgaacgacggcaaacgcttcgacaagaaggtcatccgtcgtttctcctttttcaagccgctctttaaattctgccgttttatgtttaagcgcctcgtcagagagattttcataatctcctcttacggcatcaatgtcatttgctattttttcgtatttgttcagcgcacgtttggtcggatcaaacattttatttaaaatcccaagcatctataacgctcctctatgttcacatgcagattttgcatggaataaatgataattttctgtccatgtatacctctcattatcataacataccttttgctatttccaaagaatttgcaggtaaagatagagaaaaaccttccgcgcgttcacggaaggctggatgggtttattcagtcggttcaattaatccgtatttgccgtcatttctgcggtaaacgacgtttgtgagattcgtctccgcgttggtgaatacgaagaaattatgtccgagcatattcatttggagaatcgcttcttcattatccatcggttttaaattaaaacgcttttgacggacaatttccgggctgtcatcttcaatttcgtcctgaaccgctacgcccgtatcagcagcgctgccgttctcgaaataatgtttcggaagaccctgctcgcggaattttcggttgacttttgttttgtgctttcggatttgacgttccagcttgtttgttgcgagatcaattgcattgtacatatcctcgttatgcacttcagaacgaagcgccagatcagtcatcggaatggtgacttcaactttggattccttatcattatagaattttaagttgacgttcacatcggcattgacgctctgctcgaaatatcgctccagcttgccgatttttctctccacatgatcctttaacgcaggtgtaacctcaatgttttctcctctgatattgtagttcatcaaagaacgcctccctttatctaaggatatgtaactatttctcttttaccccttctgatccctgctgaaacgttaaaataatgtgtaaattcggtgaacgatgacgaatggtgtcggttttatccggcagcttccgccaggattataagtatatgcggaggacgcaggcaaaagacctgccgcttgcagcaggtctagtgaagaacatacggtttgatgcagtcgtgcgtctgctccatccacagcttataatgcggcagaaagatggtttttaaaaactcctgaaaaggggcggacgggaaatcataatcatttaacatgctgaaatcctgaaagatctcgtcaaatgagcggatcgccgtctccacgcatcggcactcaatgatagacagcagaagcgcatgagaggaatcgagatgaaaaaaagcctgaatcaaatcgttgtaaatccgctcgccctccgtcttaaaaaaatcatcctgcgtgtccaacaggtagcaaagcccctcatcaatcgtaaaaagaagctggtagtaggctgacaccaaatggtaatcgttcaaacttctcaaaacactcacctatttgcgtttgtcgtaaaaacggccgtcacttgtcgtttgatgatacggattgaaatacgtattatggtagattcgttttttcttaagcgtttttatttcatttcggataccatcctgaatccgttttacttcgccggtaatcaggcggtccatcgcggccacctgctgaagcagcgttttttcttcttcggaaaaaggcggctttatgcccgcaagcatctcctcccttttctccgtaaatgccgtaacgctgctgatgagaccgtcgctttccggggcgtccttcagtgcggcgtacatgttcttcgtttcgttatacaaagaaaagacattgctgttcatcaggcaaggccgcccgcgccgtggctgtttttccgttcactctgcatggcctgcttccacgtgtcgcgaaattcagtaacgagcttttccgcttcatctaaaaactcttcgttattctgcacgttcgcatcgatcagtcggcggcggatgtaatcataaatggatgacatctgttcagatatctcaatctcccggtttaacgtgatgctgagctcttgaatgatgttttgcgcctttacgatattttcatttttggcttcaaggttgttttgcttcatcgcctgccttgccagcttaatgaatcgcaggcagccgttataaagcataagggtcagctcttccggagcggctgtaaagacggatgtctgctgataagcagcaaaaggattatttattgccatttttataaaacctccaaggttatgatgttgaagatcctaacattgacgtgagatatgaagattggctgttcaatttctccaatgccgtatccagtgcgctgaactttttataatatctcgtttcgatgtcatccagcttcgttttcatattggaaatatttgtttctatttcatccaggctttttccgatggcaaagctggttgataccgagctttccgtacccgcctgttttgaaatttgggtctgcattttgtttaaagtgtcttttaatctccgggcaatcccctgttcctccgggtttttggttttcgctgtatcagggctgtctgcattaaacagtttagccacgagagcaggattctcggtaattttctgtttcagtttcgcttcgtctttaatgacaagctttccttgatccgtataactatcagacgtctcaattccgaaatctgcaagctgatattttttcccgtcaatcgtaaccgttgagtacagatcaagccgcatctccgccaaaccgttctgcagcgtgctgtcgctccgtaataacccgcttttggcctttgcctcccactgctcaatctgcttatcggtcatcgcttctctttgttcatcggttagcggcttataatcacggtattttgattccgacgccttctcgtttacacttttaattaacgtattgtatttatcaacgaaatctttaatgttgttaaaaatgccgtccgtatcagtcgtgctgttaatcgtaaccgttttattgctgtccgtcacgctgttcagcgtgtatttgatgccgttgatcgtaaagttatttgacgtttttgtcatttcaagcccgttgaacgtaaacttcgcgtttttcccttcggcattggccgtcagttcatttgttgcatcatcaacggcaaaaccgagctgatctttcagaaagcttttggttgcgtcatcacctgctgaaagggtaaatccttcccccgttttattggaagtgaacgcaatcgtatccacataatccgagccattggagattttctcttttaaagccgtcaccccaaggcccgagctgttcagtttggaaatgacatcgtcaatcgtatcggtcgcggcgatcgtgacgtttacctcagtcggcttcgtttcacccggatttgtgacattgaatttcaatgtttggctctgacccgaagtgaaattgatggcccctgatgatttataagtcgtcggtgtggccagctgctgtacagacatgctcgttgaaatattctgttcagcactgacagccaccgcgctgacactggaatccgaacttgttactgtttttttattccagtttgtggacatcagcatattattaaatgtcgtagaatacatgtcggcaatctgggtattcacttcccgataagcatcgcgcttccattcaagcgtctgcttttgctggtttaatttattaagcggctgcttttcggcatccatcatttttttcaccagagaatctacatcaagaccggaattaaggcctgtgattcttgtgaccatatgtaccctctccttttcggcgtttagtcgtatacggctctatgacaacagtgagtttccgactgtttatcatatcacagctccataaatgtatgatcttattcttatatcggtcatattaaaaggttttcaataatttaactgcaaaatataatgtttcattttgtcaatagggttctttggcttgctgaagggggagatagctgaagaaataaaaaaaagaccctggagaaccaggatctttccgtcattaacctttcagcaattgaagaacttgctgaggctgttggttagcttgcgcaagcatagcttgagaagcctgagtaaggatgttgtttttcgtgtactccatcatctcagaagccatgtctacgtcacggatacgtgattcagcagaagtcaggttctcagaagaagtaccaaggttgttgattgtgtgctctaaacggttttgaaccgcaccaagtttagcgcgctcgcttgatactgtgtcgatagctgttttgattgttgtaagagctgaagacgcagctttagctgaagatgagatgtcgataccttttgtagcgtctttatttactgtagtagaagttgtagtgtcagctcctacagtagcttttttagttaagtctgcgccatcaatagcagtagctttaacagcccctgttttatttaaagaatttagaacgtcttcttgtgatgcagtaatagtaccatcagctttttgcgctaatgttacagttactgttttgctagtctcatcataagacgcagttgttttatctacatcagcacttccagccgcagtgaatgaaattttcacggcttgaccttgatcgtttcttacttcgagttcagagtttccatcaagtgctgtcttctcgccaacttggccaataacttttaaagaatcagcgttcatgttgttaattgaaaggctcatagtttgaccttcgttagcaccaatttggaaagtcagtttgtcagccgtgccatcaagcaatttctttgtgttaaactcagtatctgtagaaattcttgtcacttcagaagaaagctgatccatctctttctgtaactcgtcacggtcagaagtagtgttcgtgtcgttcgccgcttgtgtagcaagctcgctcatacgctgaagaatgctgtgagtttcgtttaatgctccctcagccgtttggataagagagattccgtcttgagcgtttttagacgccatgtctaaaccgcggatttgagaacgcattttttcagagatcgcaagacccgcagcgtcatcaccagcgcggttgatgcgaagacctgaagataatttttccatgttttttgcagcagagcttgaacctgcattcagctgacggctagtgttaagagccgcgatattgtggttgattctcattttgtatttcctccctgaattgtttttcgcacgtccttgtgcatttgcgcagcgtcattctgaagaaaatttttcctctcattggctacactatatatatcggatggccgtttctattgtttatattgaaaataaaaaaatcctcactttttttgtgaggataggttaagtaataaatcagtattaaaagatacagctctgttgttctcttccaggatcgacaagtagatttctttcctgtgaatatctacgtgctgaggcgcttcaattcccagcttcacttgttctccttcgatggcgatcacctttatttcaatatccggcccgatctgaatggactcattcacttttcttgagagaactagcatgatcctcctcctatcagatgttttgtttcataggaagcatcatgtaaaatgatttgtttcgccttcatttcctttttattgacgataatcggcgcttttaaattggcggtcgtgttttcaaaaggctcttccagcgttaaaatcgccatcacttcgacgtcctctatatcttcaatatgcaaaagttcaagcgtcgcatggtcaatgtcaaattcgtaccctttaaagaaaataaacggactggcgacaataaaagcgatgtgctcctgtttgacagactgcagcgccaaaaacggtgaatcttccgacaaaggaagaacaacaaattgagtctcgtcattaaatcccggcaggccgttttcaaatgagataatctgcccttcgtctattctgatttctccgtgatattttgttttaattatcatgcttcacaatcctttaccactttcatcttttattctgcgttgccatcgtcaaccgaaatcgtcaccttaggatcttgcatcatatcaatctgaactttccccggcgtataattccatacaggtttattgacggctgcttcaattgaaggtttgcgggcttcaatatcaatcgtaagctttgaaggaatacagtcaatgtcgacgagaaactgcgcaggcagaaagtcgctgaattcgccgaatggatcgggcggtctgacatctgctgcctgccgggccatcacattgcccgttttcttttcgatagccgccatttccttcccttccctgactgtttttgcaataaactcactgcaggcttccgcacctttctgggcggcttcagcgttcagcttttcaaatgatttgagattcaagttctcccaagccctcgtctgatcaatcgtcagtttggccggcgtactttcaatgttcagctctgccggcggctgctcgattttcaggtcagcgggcggctgttccatctcgatttcttccttttgaaaggttataccgattttagcaggcacactgtcaataatcaatctcggcatctgcacagagacccctcctgtttatagtattttagtaaaaaaagcgatctccctggtgtgagtcgcttttttatatattgaagacgatcagttctattatttcaggaagtcgatcagtgacggctgaatgatattcgcattcactgacagcgctgctctatggaccgtctgctgagataaataatcaacaatcacatcttccatttctacatcttcattatcggacaatactttttcagcggttgccgcttgtgattccaatcttgtctgaatgagttccaaccggtttgtgcgtgcgccgatattggatttttcagcattcattttatcagtaaaaccgtcaatatctgacagaatttgatctgaatctgcttcggacagcgtgcctttgcttaaagaagcttctaaggagttaagaaattcaaaaacattatctccattttgtgcgacgcctccgaaagctgagtttggatcagaattcactttcagcactgctccgttcgagatgttgatgttaacatccgaagcacctgtataattctcatagttgtacgtatatgtgccgtcggcattttcagtgatcggcgggacgtctgaatttgttccgttaaacagataacgtccgtttacctgagtattcgcgacagaaacgagctgctttttcagctggccgatttctgtaccgattgctttcaattctgtttcaccgttcgaatcacttttcgcctgaaccatcaagtcccggattttccccataatatccgtttccgagtttacgcttgattccgagttttccagccatgtaaagccttgcgaaacattccgctgatactggtttacctgcgcaagctgagtacggtactgcattcccttcattgcaacgaccggatcatcagaagctttcgtgatttttttccccgtagacacttgctgctgaagccgatcgagcttgtcataacttgagccgataaatcgaagagaattttttgcgatcatcccttgagttactctcatttacttatctcctatcttcctccggtgcccataccgttaataattttatcgaatatttcatcttgcatcgttatgatccgcgcagcagcattataagcgtgctgaaactgaatcatatttgtcatttcttcatctaaagacactgcactgactgattgtctccgttcatcggctgaaagggtgttgctttcagagttgttcataagattggccgctttttgtgaattaacgcccagctttccgataagggattcataaaagtcattaattgtagtggtttcaccgttaatagtcaacttgctgttctgtacggctgcaagatttgtcgcgttggtgccgtcacttttttctccgtttaacgacgctgcgatattatcagtagacgcaaggattttgtcactgacttttattttcgctgccgcaccttttgccggcaccgcttcaccgccgctgaaatcaaaaaatgctgcaccctgttcgcctgtataggtcttccctttttcatgaactgcattaaacgcgtcagcaaaggacagcgccatattgtcaagagccgtcagcatttcaggataaagacctttttcttctccatttgacatatagccgtatgattcaataagacctaagagtgagccttttccggtaaatgcatccgcattgaccgtattgctgccgactgacacactcgacacgaggccgctgtccttatcgtagttgattttcatttctgaaactgtttttgtgttaccgtcgagcagcgtaccgagagaattgttgtttccgttcagcaattcaacgttaaccgtgccctcagcagtcgccaaggcatgtccgcccgacttattatatgaaactttaatatttgccatagaagataattgatcaatcaatctgtctctttggtcatacaaatcattagggagcataccgctcggctcaactgccgctatttgattgttaaggtcattcagctgattgagaatggaattgacctgatccgctgtgttatccagattctttttaatatcaccctgaatgttagtcaaagaggtagatatatagttaaaactttcggcaagagatttcccctgctcctgcaaaactgagcgcgctcccgtattttccggattcgtcgccagatcctgaagggcattccaaaacgaactgagcgatccgtttaatccgttatcgtcaagctctttcatgacgccttccatttgcgacaatgaattggaacgggctgtatagtaccctaattttgtattttcagttctgtactgatagtctaaaaaactgtctctgacgcgctcaactgaaccggcttttactcctgttccgatttggccggccgtcagatcactgttttttgatacagcgggataagggcttgtcgattgtaatgtgacgcgctgcctcgtatatccttctgtatttgcatttgcaacgttatttgaaactgtgctcaatgcagtctgctgcgcactcaatgcacgccttgctgtttccagccccataaaagtcgatggcattgaaaatcctccgttctaagcttttgaatcgaataatgtcaaacggctgacaggcttgcgcgccgcttgcggctctttataattcatattctctttttcacccggcatgatcatatcgaatgccccggagatgaattgtaaagcctgaatcgtgagctgtttgttcatctcattcacttctttcagacggtcaagaagcgcagacaaagagtgaaataacccttcaagctcctgtttttcactgcctgaagttctggagatgcatgcagcaattgtattgtcctcaccgcggctgagaaactgagaagttaacctgattcgttcttcctcagtctgcccgattgcctgaatatacttttgctctttggtcaatatgttggagagctcttttgttttacctgctttcagcgcttccgttttctcctcagacagcgtgagcagatgttcatgcagtgcgcaaagtcgcttcagttgatcaataattggctttgctgacattggctttctcctttttattgctttttatagaaattcactatgttttcagcgatgctgtttgaatctattttatatgttccgctctctatatccgctttaagctgagcgattttttcctgtcgtgttttagtgaccgcatctgacgcattttgaagctcttttgcatgagaagaaatttccactttgtccttcggctttgcagcctctttttgtacggcttgcttttcgtaatttttttggtatggattaacggattgtgttccgtactgattgattttcataggattcctctcgctttctgttcgcagtctaattcttttatcgactgcgttatcagttagtttagggaatcaggtgtttttggtattataggcatagtatgtgtcttttgtactgtttttatcttcgaattcagcggctgttttttggttcatatggtctaattgcgactcaatatctgtctgacaggacttgcaaaatttccccgtcctgattggatttccgcacctttcgcaaggatatgccaaattcggaagctggctgatctgaattcttttttgtttgataaacttgaggatcagctcttcatccacacctgtttcctcagtgatctgctgcatcgtcgactgtctgttgatctgctttctcaaaaatttatagacggtttcaaatgctttttcttcttctttaatacatgcctggcacacggtctgcaggttcgttttaaaaaataaagcattgcattttggacaattcgccaattcacccatcgtattaactcctattccttctttaatctgccttatatttctatcaattatatcggcagaaaaaaaaaatgatttagctcctgattaaagtaaaagaggagaccgatgacgctttacccactgtcagcaggacttcggcggcttggtgaagtgtggcgcccgtcgtataaatatcatctattaaaatgacgttcataccttcggcggagttttcggctgctgaaaactttttttctgcagacagcctgtctgttttgctctttttggattgtttttcgttgttcagtcggatgaggggggaaatgacgggcattccgagcagagaggccagcagctcggattgattgaatccgcgttccgccagccgttcgccgctcagcggaatagggatgagagtatgtgtatttgatggatatgccgctttaaagccggcagcaaagtcacgttcaaatgcttgaatgattttcgcatcacccctgaatttaaaacgggccaatgagtccttcatcgcatcattatacaaatataccgaacggtttcgccgcagcaaaaagcgcttttccgtttttgattcccgggccgcacaatcagcgcatttttcatttgactcctgaggcctcccgcatatactgcatacggggccttcaattttttcgaattggctgctgcatatgctgcatacctcttgctcgggcgccagagaaaacagagatctccaagtcaatgaacttgaaattggtgagtcacacaataaacaattcagagatattacgctccttcccgagtttcacagaactcgcttggattaaccgaaacaatcgccgctgattcagccagaatgacaagcagtgccgtatttttctgtttatcaactatctctgcttttgcataagcaactttctttttatctgtaacatatgccggctcagcccggtttaatgaaagtgccagtacatcatttttgcatacccggcatgtgcatttcatatgaagctgagacatatggcggtcgagaagttcctttaatacgatttcttttgaattgacaagcatgctgacagctcctcataggaaagtatgagtatactgtatcacgttttctgaaattaactagtccaacaatttacttttttgtgccaatttgttcatatgttctatatgtttttttgcttttttcattccgcttgtgattccgaaatgaaacatgacgacatcaccgctgaaatgtttataatgccttcctgttctgcccgcgatctgtacgagcgcgctctcagtaaagataggtgcttctgcgccgaggacacatgtctgaactttgggcacggtaacccctctttctaaaatcgtagtcgttaccagcaggtcaagccggccgtctctgaaccgtttcactttatcctttctgaatgtgtcttccgcatgaacgccttctgcccttacatttaatttctgaaaataatccgttgtctttttcaatacatgtacagacggaacgaataagaaaaccggcagctgtgattgaagtttttggcggacccaatcggttacagagcgcggcagttttcctttctgaagcttcttcttccaattgccgcaccacaaaaaacgcggctccgggaggggtttccgatgatatctggccggtatgcggacgcttttcagcaaaccggcttcagccttcttttttaatgtgtctgaaggagttgccgttacataaacaagggcgctgtttttcttcctcgctttatcaacagcgaatcttaatgtctcatcggctgaaaaaggaaacgcatctacttcatctattatcatgacatcaaaaatgtctcggtagcgcatcagctggtgagcggttgaaatcattaacggagtcagacggcctttgtcctcgctgccgccgtacaaaacagaaacttcgactttctcaaatgcttttttcagtctcggcagcagttcaagtacgacatctgtacgcggagtcgcgacacagacgcgcaaaccgtgattcagagcaaactcgatacccggaaacagcatctctgttttccccgatccgcaaaccgcccatactaacagctcttgtctctcttttatcgcatctgtaagcgcggcggccgcccgcttctgtccgtctgtcagtgttccttcccaagaaagctttacaggttcccagctgttttcataggcctgattccaataatataatgatgtcagttcatcagcccttcccatcatgacacaggcacggcaataggtaatctgccttttggcagagggcgcccaaaatgccgcaaagctggcttgatcagactgaccgcatcgttggcagacgtaacggtttttccggcggatgattgacggctcgtccgttatatattctttttctgtaaaacgcttgatgcgctgatctgaaaacggtatctcagatctcaataaatgccggccgtaaaagaaatcccgcacctttgaaaattctgaagcaccttcggacatctccctgcctcctttctgctcaaagtatgccttgtcgggaacccacttgtcgaattgcgaaaattaaaaaataaaaaaatctccgcccttgaaaacggagattttcacttagtttttaaagcaccagccgattccgatggcgccttcgcccaaatgggttccgatcacggcaccgaaatagctgttatagaattcgacatgaggatatttaccgcttaactcctgtataatatccgccgcttcttcttccctgtttgcatggatgacagcggcccgcatcgggattcctttacttgcatcctccccaaacagctcaaaaattctcgaaatcgcttttttgcgtgtccgaatcttctcaaaaggaacaattaccttattgtcaaaatgaagaataggctttacctttaacagaccgccgataaaagcctgagcactgcttagacgcccgccccgctggaggtgtgataaatcgtccaccataaaatacgcacggactgtttttttcatttcttccagctcttttataatctcttccggtgagtcaacaccgtctttaatgagctgtgctgcctttaatgcataaaaaccttgtgccaaacagctgatctctgaatcaaagggataaactttaatatgatcaaccatagtgtttgccgaggcggcgctgttatatgttccgctgattccgctggacaaatgtatgcttatgactgcatcatatgttttgcccagttcttcgtacaatgcgattaattcaccgaaagaaggctgagacgtagtcggcagctcatcatgattttttacttctttataaaaacttctccagtcgagttctgtttcttcgcggaatgttttttcaccgaaaaccacttggagaggaatcatatgaatatgatgttcttctctcatctctttcggaatatatgctgtactgtctgttacaactgcaatcttcatcactttacctgccttattaagtacttaataagtattttaatagatatgcagctgtaaaaaaagacttgccataacaggcaagtcttctcacacatggctaacgcatctctacccagccgtttttaatggccacgacaacggcttgtgtccggtcattaacgttcattttctgcaaaatattactcacgtggtttttcactgttttctcactgataaacaatgattcaccgattccgcggttgctttttccgtctgcaagcatttgcagcacttcacattcccgtctcgttaatatatgtaatggtctccggatttccgggtaaacctcatgctgaggatgagcagaaactccgcttgtcgcaagacggcggaattcgttgacaagattgtgggttactttcgggtgaaggtaagaaccgccctcggctaccactttcactgcttcgattaaagtatctgcgtccatctctttcaggagatagcctcttgcacctgtttttaaagcatgagtcacatagttttcatcatcatggatggagaggataatcaccttagattcagggtacagctcaacaagctgtttagtagcctctactccatttacattcggcatattgatgtccattatgacaacatcgggatgataatgctcgacgattcgagccgcctcatctccatcgtcaccttctgctaccacttcaaaggtaggttcaaaatccaatattctttttacaccctcacggaatagttgatggtcgtcgataataacaatatttactttagtcacacgctacgcctccttatcctattgttctatatacgccgctgttcggtcaatatgtcttttggctctatttaacaaattataggccgagagataacggaaccttaatcatgataaatgtcccaagacctattttagagtctatcgttatcgttccttcaagcagatctactctttctttcattcccagcaagccgaatgacttgtttttcttttgtttagcatccttaatatcaaagccttttccgttgtccttaatgatgagaacgacaaaatcagcggttacttccacttttactgtaatttcctctgattctgaatgcttgagtgcatttgtgacggcttcctgagcgagacggaaaagcgccacttcaaattgcggggcaagcctttggttctccgtgtctccgatacactgaaaatgtattttcacctttccgttgtattcttcagttgtataaagatattttctcagtgtcggaatcagcccgagatcgtccaatgccatcggtcttaaatcatatataatccttctgacttcgtaaagggcattccgcacattctgccgcagatttctgatttcctgaaatccgtcctccgtgccgcggtcgcggaagatccgttcaattaattccgatctcatcatgacatttgccagcatttgcgcgggaccgtcatgaatttctctggaaactctttttctttcttcctcttgggcttcaatgattcttaaaccgaaatcttgtttagcctgcgcatcggcaagaagaagccctacttggcgaaggtcttgattcaggtaattcagaacgacggttatttggctgaccaatgattctgaccgttcaatgatttcctgaagccccaaaagccggcgttctaaatcatctctgcgctcccgcagctgcttttcacgctgttggatcatcgtcagttccacttgaagtttgtgcgccttttcataggcgttgcgaatttcttcttcgctgaacttatggaaatttctgcttacttcagacaagcggtttcgtgcgtgccgcgtatgaacttcaagtttgtcgcccagctcaatgacttcgtagacctgctgtttgatctgtttgagttcttcaaccagctgctcatattgctggcgcgactgctctccgatttgaaaaacctcgtccttgctcccgtccacggttttcagcattttcataagtatagaatccaaaactttggagtccatcttcgatttattcatctgtctccctccgtaacggtgttgttatgtatttttattataaatgtaattgaactgcaatttatgtcgaattataatgaaagaatgcgtatattctagaaaaaaacatttttatatagtatcttactctttcatgataccaaaatatgcgcaaaaattctaaagtctgttcgaatttgtagaaacaagtcttttaatgcttgtcaggagggtccagcaatcatgctgcacagctatttaacagttaaagaaacgggtgaacatgagattgtgattgaaaaatcgcgttttatgtgtcacctgagccgtgctgcttctgaagaggaagcgcaggaatttatacaaaagataaaaaaacagcactggaatgcgactcataactgctcagcttatctgatcggcgaaaccgaccatatacaaaaggcgaatgatgacggagaaccaagcggcacagccggcgtccccatgctggaagtgctgaaaaaacgcggtctgaaagatacctgcgcggtggttacccggtatttcggcggaataaagctcggtgcaggcggattgattcgtgcatatgggaagtcagtgtctgaaggcttaaatcatataggagttacggagcggaagctgatgcggattatgcatacatcagcggattatacgtggctcggcaagatagagaacgaactgagagagtcagtttttttactgaaagatatccattatgcggatcatgtcgaatttgaaacgtacgttgaagaaaaagacaaagaagcgtttatcaaatggatgacagaactgacgaacggcaagagtaagaatacagagggagaactgacgtatttagaaacagacgtcagccctaaaggagactaatgtaatggctgaacgtgtaagagtgcgtgttcgaaagaaaaagaaaagcaaacgaaagatcatattcaaacgaattttgctgctgcttaccctcgttttgttagtcgctgccgggtttggcggatacaaagtatacaaaacgatcaatgcggcagataatgcatatgatgccctttcccgcggagacaaatcaaaacttcgggataaagtcatcgatatgaagaaaaaaccgttctccattttgtttatggggatcgaaaattatgccacaagcggaaaaggcggacgatcagactctcttattgtcgttacccttgatccgagaaataaaacaatgaaaatgctgagtattccgcgtgatacgcgggtgacgcttgccggcgatacaaccggtaaaaaatcaaaaatcaatgcggcttttgctaaaggcggggcggatgaaaccgtctcaaccgtcgaagacttattaggcataccgattgataagtatgtcactgtcgattttaacggctttaaggatgttattgatgaagtcggcggagtcaatgtaaaagtgccttttgacttcgacgagatgagtgacgtcagtaaaaagaaacggatctacttcaagaaaggaaacatgcatttgaacggtgagcaggctctggcttacgcacgcatgagaaagcaggataaacgcggagacttcggccgtaatgaccgccaaaagcaaatcctaaatgcactgatcgaccaaatgtctaaggctggaaatattgctaaaatcgataaaatcgctgaaacagcaagcaataatgtccaaacgaatattcgaatcactgaaggactcgcccttcagcagatttacaacggctttaccagcaaaaagattgatacactgaccataacaggatcagatttatatttaggcggcggcggaaccgcgtctacgggcggaacgtattatttccagcccgatccgaccaatctcgaaaaagtacggcaggaattgcagaaacacctggattacccgtccggaagcagcacggcgtccgatcctgcttctgacagcaccggaacggacagtacgactgattcgacttctgacagcacaggaacaggcggtacggctgattcgacttccggcagcgcaggaacaagcggtaccactgattcaaccaacggtactgccggtgcaaacggtacggacagcacacagtccggcggcacaacaggctattaagagtaaacccgatcctttgagcaggatcgggtttttttatataataagagaatagcagaatccacaaaaaagcagaccattcgcatgatctgctctttttaatttttctttaccagtctcttgtaaaacttggtaaatggtttaaattgttcatttactaaccctgtgacctctgctatgatttgcataaatacaatcaatacaaaaataataaacagcgaaagccatatggtcgcgcttttcagcaggatggcactgacgctgaaaataaagccgattaaataaatgataatgacagccgtgcggtgtgacagcccgaaggccatcagccggtggtgtatatgtgacttatcaggcgccgaaatcggctgtttgtttaaaatccgcctgatgacggcgaatgtcgtatcaaaaatcggcacgcccaaaatgatgatcggaatgatgatactgaataaagtaacacttttataaagacctaataatgagagtactgagatgacgtatccgagaaagagcgatccggtatctcccataaatatctttgccgggtgaaaattataaaataaaaatccgagtgtgcttcctatcacgacaagtgaaagtgacagaataaggattttccctccggataacgccataacggcgatagtggagagtccgatgaccgacaggccggcagcgagtccgtccaaaccgtcaatcaggttcatcgcgttcgtaattccgacgatccataacacagtcagcgggtaagcgacccatcccaattctaaacgttccgttaaaaacggtacggagaaaaagtccattttcagtcccgtgctcacaatcataatggccacggccagctggacgaaaaactttacctttgcgcttaattggtatttatcatcgaggattcctaaaataacaataataaacgcacccactgtaatggcggtcatttttgtttcattatatatgccggccgcgagcacacccgccgctacgccgataaagatggccaggccgcccatacggggcattattttatcatgtacttttcggttgctgggctggtcaactgcacctattttgatcgcaattttttttacgataggagttaggattaaaaccgttagcagagagacaaaaaacgcaacaactatgcgaaacatgcgttcgtcaagcataaagaagtctcctttggaattatatgaagtcttttctgatattgaaccgttccttccattataattcttactagttattataacaagcatcatcaaaaagaaacacgcaaatgaaaaaatgcgctttcccttttaatgggattgcgcatttttcaatatacccgtgcattcgagcattcggccgaataaaacattccaatcccgtctccgggccaattcacggcgcaaagcctcgtatgatccgctgcggtccgctgccagaagcgcgtcgcaggccgcgatgaaatctgcggggtcactgccttcaacgtgttcataaacgaaaggccttttgatttttgacgtagaagaaaggttgcagccgacaaccggttttccggcggctaaaaattcaaaaagcttgagcggaaataccgcgtcattataaggtgaatttttataaggcatgatgccgatgtcgacaagctgcatataggacggcacttcattcggcgcggcaggtcccgtccagatgacattcggacgctccagaagcgacttgaaatccggatcgtcctgagccgtgttcgggcctaccaataaaatcgtccagtcaggcctcacatctgccgtttccgccataagcgcaaaatcgagcttcggtttgattccgccgataaaaccgagaaccgttccgttccgtccccgtaaaatgtcttcatccggctgtttattttcccgtgaaaacaggtcatattccactccgttttcaatggtgaacactttctggtgcgggttctccagcttttttccgacctcctggtgcagacagtcagatgtacacgtaatggaatcggcacgctgaatgattctcatttccgcctgtttaatgatgtttcttctaacatttgacagcaccccggaccggccgctgatcggagcggcccacagatcactgcaatcgtaaatcacttcatcccaaggaaacagatctgccagcagcggaaaaccggggaaggtgtaccataagcagcagcgggccccttcaccttcttccttcagcatgttcaccaatggtgaaagcttatgcctgtagcacatgtctgtatacctgccgaagcggaaagctttttgccgcatgagatcctttacagtgaactgccggattccctcggcgatcccggccatctgaccatcattggctcgcggagacgggcatacccaaatgacgcttttcgtttctttttgccgggcgagaaattcagccagccggtgccgtctgtatctcagccggtcatgcccccattccgccgctccgacgattacgtgaataatcggttccaccttcatcacccagctcctctgacgcctacagtcttttcaagaccgcgttttttgcatattgcataaaacaccacgaagccttgataaaatgcaggcgctcaatttctctataaacaaaccacgttttttttgcggctttccacttgttgcttgaaatcgaattctgcacaagcctgtattctgaaaggcactcattcaggccgtaagccgtaaatccccttttcagcagggaaagccatgtcgctaaatcctgccgcgttctgatatcaggcatttgaatctgccccgtctgctctctgtcaatcatgaccgttaaacatccgataatcgtgttttttaaagcttcatcatatgacaggctttcaggggcttgaatcgttttgtccgtcggcgttccgtcctgctccatgacgctgtagcccgtaaatgaaaaagcgcaggaccgctctgccataaacgcaagctgtttttgaagcttttcctttttccatctgtcatcgctgtccagaaatgcgacataacggcccttggcatgtttaagggctgtatttctggcagccgcggctcccccgtttttctctaaataaacgacgcggatccgctcatccttttgttcatattgccgtaaaatatctctcgttccgtccgttgaacaatcatccgcgataatcatttcccaatgcgggtggctttgatgtaaaacagactgaatcgtgtcttcgatatattcacttgcattataagacggtgtaatgacagatacgaaaggtttccagtttgtcatggtcacatctccatcgcagatttttacaaggactctctaaaaaactcaggaatgacaatgaacataaatgcaactgcaatgccgattaaaacgcccagaaccgctttctttttcggcggcatgccttgtcccgccgtttcattcatcggctctgaattgatgatgccggccgctttcaggttcagctgcgtatttttcaattcgtataaaaatcgttccttatccactttggcgtccgcgctgacggtttctccttcaagcgcagcaatactctgccgcactacttttgcccgtttttcaaacaggtcctgatcattcttcagaaaagtttttatgacggcttgaaacaccgattcggtctcctgtttgttttggccgctgtagctgaccgtgatcaatgaatctgattgtgtttcgacagtcagtttacttttcacggccgctctttcttcgtctgttttatcaggcaaagcctgctttaaaaaggcatcgctcgtcaaaaggagcgggatttcttttgtattgttataaagcggatgatcataatttcccgcggcgatcgcggcttctgatgtaaaactgctgcccccgctgatttttgacggcaatacatatcccgctgcccctaacacaacgggcagcgcaatgatccaaatgatattctttttgatacgctgggttattcttgtcaacatatccttcatctcgcatctccctgtttttcatagtacgccgtgacggcaggctccttttgtaaacgcctcaatatattgaccgccgcgatcacgagcgagagaaatacccagtggaaaaataaatttgatacggagcttgggctgatgctgcttaccaaaaaaccggccatcgccgtgataagtccttctgtgatcagtcttgactgattttccgattttctttcatgacatttataaagtgtccaaaaaaggaacaaatagactgtcaggtaaccgagcatcgtaagaacgccgaagttcgccataatctcgacgagccagttgtgcacctcaactacgccgcccgtatcataaacgggctctgcttttaaatagtaagagacgtttccggcacccactccgaacccccaggaatcaatcacatagtgaaaggcgttttttaaaagattcgccctcgcgaggttggaaggaagcggatgctgtcccggcatcgcctgcggagctgaaaacagattcaagacggcattggtgatacggcccgcaaataaaaccgcaaacagcgccgcacccgctcccgctgcgtacagcgcgagttttttcaacagggaaggcagcaggatgaagacgtatacagccgcccccgcgcatatgcccagcagactcgcgcgcgaaccggtcaaaatgattaaatacaaagcgcagatcgcaaagagcaggctgacggccttcacatagccgtttttcatatttttcaccgccgccgcatacagaaagaaactgatgcacaaaaacgttgcgaaatcattttgattaaagaaaacggacgtcggataatgctgtttgtactgcgggccgttataaagcgtggagctcggcagatggtggtgtgtaaaatgattgtaaaagccgatcgccatcacaaaaatggtcatcacaagccatatgccgtaaaaaaccatcagctgatcaaagcgctgaatgaacatgacaataagataaatcagaaacatgcccattcccattaaagctaaatatttaatcccgtacgtcacggattttgcccacaataacgataggagaccgtatgtaaaccataaggcgaaaaacatcagaaccccttttacattcacccgattccatctgtcaatatgatgacggtttgtcaggatgccggcgacgtgaagggcgcccgctccgattaataacagccggtatataaataagctgaaaaatccgagatggaccgcaaagaaggcctggtttaaaaatgtacacgcgatcagtatataaatgagccccataaacatctgaccgtttgttgtaaaggcggatagcaaagcaagtccggcaataccgatcatggcggcaagcagcagcacggtgatttttccgaatccggcatccgtcctgaccgcctccagcgtgatgaatcctcctgtaatgagagcggcaagcagcacaagaacatgtgccgctgaacgtttgatactcacatggcaaacccctttccaaaacagcagccgagccgggctgccgagagcctgaagacaaatctttttctatcttgccagttcttttatttgccgatcggcatgaaccgccggacgtccgacggaatgataagtgaatcctgaaatcctcatatactccagcggaaacatatttctgccgtcaatgataaccggctgtttgagcagctgcttcactctctgaagatccatctccttgacttccggccaatctgttgtaatcaggcatgcgtccgcgtttttgatggcactgtacagctctgtgtgatattcaatgccgccgtctcctaatatcgctgacgcttcgggaatcgcgatcggatcatacgctttcacatgagcgccctgctctttaaggcttgtgatgatatcaagagccggggcggagcggacgtcatttgtgtgcggtttaaaggccagccccagtacggccgcggttttcccttttaagggaccgatggcgcggttcaatttttccgtaatacggacccgctgcttctgattggtttcaatgacggcttccatcatttgaaacggatagccggcggcgtttgcgatatgcaataaagccgttgtatccttcggaaagcaggatccgccgaatccgatgcccgcctggagaaatttattcccgatccggctgtcaagaccgacgccttctgacacgtgggaaatgtccgccccgacacgttcgcaaatattggcgatatcgttaataaaagatattttcgcggctaaaaaagcatttgcggcatacttaatcatttccgcgctttcaagattcgtctttacgaccttcgtacggaacggcttatgaagctcttcaatgaccgaagcggcatgttcgcttgtggcgccgatgaccgcccgctccatctgcatcgtatcccgcaccgccgaaccttcacggaggaattcaggatttgacgcgacatcaaacggatattttccctttgacgcttcgctgacgatttggtaaacgagctttcccgtcccgaccggaacagtgcttttggtgacaatgattttgtatccgttcagctgttctccgattgtttgcgccgctgccttaatgtaggtcagatcggcttcacccgtctttgacatcggcgtaccgacggcgatatagatgatatcagcggctttcacagccggctcaatgccggccgtaaaggataagcgcccggcactgacatttttttcggctaattcctcaagtcccggttcatatatcgggatgactccgttttgcaagcttctgattttcgcttcattgatgtcacagcaagtcacatgatggccgatttccgcaaaacaagttccagatacaagacctacataccctgttcctaatacagcgatttttttcacagcttcatccctctttcgaaaggttctcctcttgcccggcccggttcattacggatcggtatttctctttcagcgttttcgcgttttggcttgcgtcaaaatacatgcggacggtttgataaagttcctcggctgtttgcggcgtccaagcctctccttcgtcatattgcagaatcgattctgccagcgtctcaggtgaacccggcttgatcagcaacccccggtgtttcccgaataaagaagccaatcctccgacatcggtgcagatcaccggcmccttcagagcgagcgcctcaatgaccacagtcggcatgccttcgctgtaggacggcagcgccattacatccgaagccagcagatagtcctgtaccttgtcgttcggcaattgccccgtgacgatatgagcggcttcacgcaatgaagatgcggcgggaccgtcaccgacaaagacggcttcatacctttcatccaatgattgaacggcttttgataagtcgaaaacgcctttctctttgacaagcctgccgatgaacacgatcagttttttatccggaggaaggccgagccgttttctgacggcttctttcgtctcgttcctttttcggaaggcgtcaagcgtgatgccgatcggaagcacggtgcactccgcttcgataagctttttcatttgttcccgcagactgccgctcacagcgtaaatatcggctgcttcccgcaccgcaaatgtaaatgcgcgatgagcgcttttgctgtaatgcggatagacattgacatcactgccatgcaaggtcagcacatacggaatgcctaaagcctttgacacaatggcggccgctccgcctgacggcatggcgaaatgcgcgtgaatcagatcgggcttcaggccatgatttttaatcgcggaaagaaccgatgacgccattcttttatgcggctgcgcccatttcagctgcccgggaaccgcctgataaaacggccggtggacggacacgcctttccgccattcatgcgccggcctgatatccttttgccgatatgtctttttcagcacccggaatggcgcggcgagtttcggccgcggacaaatgacggtcatctccgcgccaagctttctcagttcttgggcctgcgtctcatgaaaaacgccttctcccggcttctcactgctcggatagacacttgtcatccacaataccttcatagcaaacgtccttttcttaatttacttttcatatgcggataagcttttcctaacaggaataaataacacaacgcgccgcaggctacggagatcgccagccgcagcttgacatcaaggctgatccgctccgtgccgaagctggctgtaaaagcgatgacacccattgccgccgtaagcagaaacggtttggccacggctttgaagtaagccgacagccgcagcttaatgacatatgccaacagccagcgcccgatcaggaaattcaggatgctgatgaaagcgtacgtccaggctaccgtcaagagatttccggacagcacggcggcgtacaaagatgcaccatacagcagcatcaccccggcgtcccaataaaacgccagatcggcccgcccttttgcgagcagcacagatccgttcggattcatcagaacccttaatatcccgacgatggcgagaacgtttaaaaccgggacagccgccagccatttttctccgaataccgaagccacgaatgcatccgacactgaaaccaaaccgagcaaaagcggaaaggatatcagcgcgagtattttggtcatattgagaaatccttctctgataacgctgttttcatgcttgtttttcgcaaagacgggaaacgcgactctcgtaatgatcggattaatttttaataccggaagcgtgacaatctggtaggccagattgtaaatgccgagcgcctcggcgccgataaaactgccgatcagaatcatatcaatattcgctccgagccggttcacaagccgggaagacagctgaaaggccccgaaagaaaagaagcctttcattcctttcagatcaaaaaccaacgccggtctccatgtttttctgcaggacatccagtacagaatcccttttgacgattgcagcagcacctgggaaatcacataggcgagaatcgggtccgtataaaaaaccgcggccgccaaatacacgaaggacaacacatttgaaaagatttcaatcttgcttaacgtgttaaatgccagcgctttttgcagcatatactggtattgctgaccgatcggcgcgattaaaaacatgacggccagcacgcggattaaatagacaagctcctcccgccgataaaaatcggcgatgagcggactgctgaaaaacagcagcgcaaacagcgcaagccccgttatgatattcagccagtacaaggaagacatctgtttatcagtcacatgatctttttgaatgagcgcggcgccaaaacccatatcaagcgcgatttgggcaaacaccactaccgttgtgatcatgccgacaaggccgaattcagccagtgacatgacccgcccgagcagggcgaattggacgatttgaatgaccgtaatacacgctgtcgaaatacttgtccatttggcgccgctcaagatttgatttgtaatactaggcatcgttttccctacttttttgtctgctgaccagaatttttatcgcgccccgtcaccggtccagatcactttgcacgttttgagcataatcttcagttccaatgaaaaggtcaggttgcggatataatataagtcaaacatcagtttttccctcggtgtcatgtcatatcccccgttgacctgcgcccagccgcttaatcccggcttaacggccagccgctccgtaaaccccggaatctcagcctgaaactgttccgtaaacacgggacgctcgggacgcgggccgatcaggctcatttctccccgaagcacatttaccagctgcggcagctcatctatacgggtccttctgataaaagcgccgacctttgtcacgcggggatcctttttcagcgcccagaccgcccccgatttttcagcatctattttcatagagcggagcttatacaaataaaacggcttcccgtctttgcctacccgctcctgcttataaaaagccgggccgggcgactccaaacgaatcagtatggagaacaggcccatcaccgggagcgccgccaaaagccccgcaagcgcaaacacaatgtccatgaatcgcttaaaagccaaataacgggccgttctttccgtaacggcagcggaagtcccctgccgcactgcatagttattatttacattcatgcttttctctgctcccactgacacacacctcacgatttgttgggatgtttgatgacctatgccgtgagtttagcagatggatgttaattggaagtaaaggaagcgttaatgtttattagaatgtttcgattattgtttttttattgtaaatctattcatatccatatttgagacaaagcataatgaaaaataaaaaaacagaccggtatgaaccggtctgtttccatgaaaaaattatcggaaataggaggaaacgccttgggtgatccccgccgcgagtctgtcctttttcgttgattgttttaaaatattggcatcaatcgggcttgtgacaaaaccggtttctaacaagacactcggcattttagaatacttaatgacgtaaaatccggcagttttcacactgcggtcacgcgtgccgagagcagaaaccattctcggctgaatattttgggcaagcctcagactgtttgcggattggtacgttttatcataatacgtctccgtaccgtttgcactgctgttatcatttgcgttcgcatggacgctgatgaaaatatcggcgttcgccttcgcccctttgttcactctctcctcaagcgagtcaaaggtgtcgcccttcctcgacattacagtaagcgcgcccgcgccgtataattgattgttaagacgcgtagcgatatcaagatttacatttttctcaagcaagccgttgccggttgctcctgaatcctgatagccgtgccccggatcaataaagaccgttttgccgacaacgggatttttaagctgcgacgcggcattgttgcttaaagatgaagcacttcctatgacggtgaagctggtgatgtttttacttccgatatacgtccggacgtcttttgacagactgtctccattcgtcagcaggtgaactcttccctgtttggcgctcagcacgcctccgacgatggtatccgcctctttaaaaccattggtaacaaacgtatagcctgtgcttaagcctgtcttttttgcaagattcacagacaggttatagcggtttttgccgctgattcttgaagggttcggcagcttattataaagtgagctgctgatgctgcttgtcccgccaatgacaatcgtgtttttaatccctaagcttttgatcgcattggacgtagaaccatttaatgtcgaatcattagtgaataaaatcggatattttttagcggacgcataagaaatcgcagccattccatctgcatcaacaaacccgttgaccacaagggctgtagaagatcttgtcatttcacccgccacttttgcggctgtggcatatctcgtgctccctgataatcgtttgacactgatgcctaatttagcaatttgattttcagtatttttcgaaacggcaggtgtgccgcctacgataatcacatttttcgtttttaaatcaattaatcccttttttgtgccggcagacagctgatctttatttgtaaacagcagcggcgcatttttttgatatgaaagcggcgcagcggcaattgcatcggcatatgaagttccgccggtgataattaccgttttcgcttcaccccatgattgttttgccgccagtacagccgtatcataccgggtgcttccgccgatccttttaaccgtgttatcagccaaagcggaagggacaaatagaatgaccccgagaataaagacggggagacattttatgatgaatttcaatccgatctcctccacagaagtttagtagtttgtaagtgctgtattagggtaatagaacgcaagaatagaagtatacggctctccggcctccgctctttcttttgctccgtattgactcattcctacgccgtgaccgtatccttttcctgatatcgtgatttgcgaagaattaccggacgcactggcgtatgtgcttttaaaagatgaagctccgatcatcgtcctgagttcagacgctttcacctcaacagatgcagtcttgttcatgacatagcccttcgacttgtcattcacatggtacgtgaccttcaccgcggcgtcttccgcgcgctggccttttgtttttccggttagcgagagatcagagatgcttgcaatttttatggaacttgcattggtttctttatttttcatcagccaattttttattccgttgagctgcgcagcatttgcttcgtttgttttagaccaccaggatgcgggatttttcatatccagacccgctggcagctgctgcttctgcaatgttaaagaccagctgatttccggatcttttgtatcctttttggctactaaatacggcactttcgatccccacacttcatcgccggcttccatgtaaccgccattgcttgatgagtaagtggcatctatcaatctgccggaataagtgagcactttcccttttgttccgttaacggctgcggtggcgtttggataccagctgtatcccccgtaaacctgaaaggccgttgtatccgcgactgtttgtcccatcttgccgatagagtaggtgcgggcggcaacagcctgggctttcagcgcttctgtcggccagcttcccggcatttcattcggcaggacacctttcagataatcctcaaaaggaatgttttcattaacaggtcttacatatttgccggattccgcagtgaaactcatattccccagatatggcttcccgtcaatgctgattgtgtttgctgttgaatattttgcaggaaccgccttgaaagacgtttttccgctgttaatgcctgcaacgcctaatttgccgccggacgtttcaatacggtacgtctttccgtttacgagataaaactcttttgcgtaagcagccttaactgaatcggcaattgaattcgcgctgcctattaatgtataagaataggtgcctttcgttttaaaaaggctggcctcgtcggcgggtgtttcgctttttttgatgtatacaagcggcatgtgatttgcggcggcaatatttgatccgacaacgatgtccgctaatttagtcccgttggcagccaccgttttgcttgcatccatgccgagcgaagtgactgcgtttgctgatatttgatatctgtttgatccggtaattcttttggtgaccgaggccttctttttaatttgattctccacatctttgctgacgcttgaagtgcctcccatgatgatcacttttttaggcagattgtagctcggaagggagtcttttttcgtcaggagaattggatagccgttttgcgcagcataaggcgcgattgccagcgcatccgtatatacatcccccgttactacgaccgcctggtcatagctgcccatttcggccgcaatatttttggacagatcatatctgttttttccgctgatccgtttcgtgcggccgtatttcttcaatgtcttttccgcggccgacgaaatactgttcgtcccgccgatgattaaaatattatccggactgaatttcttgatttgcgcttctgtgctgctgctcagttttttcgcttcagtcagcagaacaggcgctttcagtttattcgctaaaggaatgacggaaagcgtgtccgcaaaataagcatccgtattaacgacaactatgttggacgggtttttccaatacttggatgtcgcggcgttagccgtatcatatttggacgcgcctcccaatctggcaacggaggagacatcgcttcccgtcagtttataagttcctgaaggttcgatattcagagtcgatttattaccaatataattcgtcagttttactgagatatcagaactggacgcaaaagtgctttccggtaataaagccaggctgaatatcacagaaaaacagacagcccatattgttttcttcaatttttatcccgccttttgctgatcatggtgtattattttgctttctcgatttccttgatctctttttggcctttatcatttgtgaaatacgtaatgctgactttgtcattttcgctgaatttattcagaacatcagagaagtcatcagaaaattcaaagctgacgggctgatcatccacttttacttcaattgtgtgcgtatccgccataccgacataatatgccgtttctttttgagcctggttctccgaagaaccgcttcccttctttgattgatccgccgttccgcacgctgccaatacaacagaaaaaagcagtattaagaacgaagctgcaatagtttttttcatttttttcacctcatctttatgtatcgtcttatactaacttttttttaaggtaattttaaggtctttttgtaacctttttttaagaatttcgtctattacatggttataagtaaaaatatgactgggtttataaagattagtaaattgtatcaggaaagttaatagaaaaggtgatgacaaatgagagctgaacgaaaaagaaagaagaaaaaagttcttctgacaatcgtaacaatcatcgggctgttagttttatcatcaggaggctacgtctactacttgtggcacaaagcggcttcaacggtggcaagcattcaggaagacttgaaaaaatcggacaaacgtgacacggatatagatctcggaaagaaggatccgatttctgttttaatcatgggcgtcgatgagcggaaaaatgacaaggggcgcgcggatacgatgatttatatgaccgtcaatcctaaaacgaatacaacagaaatggtcagcattccgcgtgatacgtatacgaaaatctccggcaaaggtacgatggataaaatcaaccactcctatgctttcggcggaacgcagatggccgcggataccgtcgaggacctgcttgacgtgccggtagattattttgtgaaagtaaacatggagagcttcaaagataccgtggatacactcggcgggattacggtgaacagcacgtttgccttcaactacgacgggcactctttcggaacggggaacatcagcctgaacggcgaagaagcacttgcctacacgcgtatgagaaaagaagatcccaggggggatttcggcaggcagcagcgccagcgccaagtgattgaagggattatttctaaaggggcaaacatctcgtctgtcacgaaattcggagatatgtttaaggtcattgaaaacaatatgaaaacaaacatgtcattcgatgatatgtggacggttatgactgactataaaaacgcccgcagcaaagtcactcagcatgaactgaagggaacgggaacgagaatcaacaatatctattattacaaattagatgaagcaagcctcgcttcagtcaaaaaagaattaaaagaaagcctgaaataataaaaaaactctgcatatgatgcagagtttttttattctgtaaaaggctgcggacgggtttttctatagccgtaccgataaagcagttcttccacaatccgttttgaagccgatccgtcaccataagggtttgacgcctttgacatccgttcatattcagcctgatcggttaagagctgttttgtcagctgatacaccgtttcttcatctgtacccgccagctttaatgtcccggctttcactccttcggggcgctcggttgtgtccctaagcaccaagaccggctttccgagagaaggcgcttcctcctgaaccccgcctgagtcggtcaaaatgaagtttgctttcgcagcgaagttatgaaaatccacgacctccagaggttctattaagtgcaccctgtccgaatcagcaaaatgggcttctgcggcctcacgaactgcgggattcaaatgaacgggataaacgacttgtacgtcctcaaactcttcaacgactcttctgacggccttaaacatctgttccatcggcctgcctaaattttcacgtctgtgcgctgttaaaagaatcatcctgcttccttccagcttgtcaaaaatcggatgaaaataatcttcccgcactgtcgtttgaagcgcgtctatcgccgtatttcccgtgacaaatatagaatccggctttttattttctgaaagcagattctgctcggcctggcttgtcggcgcaaaattcacatcagcgatcacgcccgtcatctgccgattgatttcctcggggaaaggagagtatttattatgcgtacgcagaccggcttccacatggccgacagcgatttgatggtaaaaggcggcaaggcttccggcgaacgttgtcgtcgtatctccgtggaccaaaacgatatctggttttacttcttggaacagcttgtccagtttcagcaaagcatgagatgtaatttctgaaagcgtttgacgctctttcataatattcaaatcaaaatcaggcgtaatgctgaatgcttcaagcacttgatccagcatctgtctgtgctgtgcggttacagtcaccagcgaatcaatttcctgatatttttcaagctctaatacaagcggagccattttaattgcttcaggtcttgtaccgaatacggtcattacttttagttttttcaacggtttgtctgcacctcgttttatatgtcggatatcccttcatgttaacatatttatgccgtttcttagatattgtaaagcttaatggcaaacaaagcaaaaaccgttccaagactctttgaaagcggattaaaaggtgtgaattttaatcaattgtggtaaagtggaaaaagactaggttatagttctgaaaaaaagattttgcagaaacaaggatggtgttattcagtgaagaaagtacgcaaagccattattccggcagcaggtttaggcactcgttttttgccggccacaaaagcaatgcctaaagaaatgcttccaatcgttgataagccgacaattcagtatattatcgaagaagctgtcgaatccggcatcgaagatattattatcgtaaccggaaaaggaaaaagagcaatagaagaccatttcgacaatgcccctgaactggaacgtaatttagaagaaaaagggaaaatcgaactgcttcaaaaagtgaaaaaatcgtcaaatattgcggatatccactatattcgccaaaaagagccaaaaggactcggtcatgccgtttggtgcgcacgcaacttcatcggcgatgaacctttcgccgttcttctcggcgatgatattgtccaggctgaaaaaccgggacttcgtcagctgatggatgaatacgaaaaaacattgtcttcaatcattggtgttcagcaagttcctgaaaacgacacacaccgctacggaattatcgatccgttaacaaatgaaggccgccgttaccaggtcaaaaattttgtagagaagcctgaaccgggtacagctccttccaacttggctattttaggaagatacgttttcactcctgaaattttcatgtacctggaacagcaggaagtcggtgcaggaggagaaattcaattaacggacgccatccaaaagctcaatgacattcagcgtgtcttcgcttatgatttcgaaggaaaacgttacgatgtcggtgaaaaactcggatttatcgagacgacgcttgaatttgccttacaggatcaggatatccgccataaattaattccgttcatgaaggatcttcttgaaaaagaagaagctgacgaatagaaaaagctgccgaatccggcagcttttttatgtgatctttactttttagacgttacggtcagtgtttgatcagcattgttcacagaaaaagtatattcctggtttttaagcatgagcaaattctgattgattttgctgccgcctttttcacttaaagctgggatgtctgcgggacgcgataaatgaaaaaccacttcggagactgtatccttgtcaatcactacatccgttttttcatcggatgtttttaatacgttccgtccgtcagccgtttgtccggcagctggatttttcaatttactctgtacatcgtcccggcttttattgagatatgagagaaactcttctgctgtttggcttgataaactgccgctgaaatcattaagctgaacatccgtcttttttaaagcgttcactttatacagatcagactttttcataaagtactctttatcgtttaatttcactttggccgcctggttattttcggcttctacctgcaccttcgtgccgaaacttacacttgcggaggcttttccttttatatctttttcagtataaaggtccgccttttcagcttttaccaaagcaggtttattcacagactcataaaggccggcatcgctctgtttgacgtcaccgaaagatgtaatcgcacgcagaggcttgtctgaaaacatcgaagcgcccgcgccgacagccagcaatgcaagcagcgtaatctgaatcgtattggcaatgaatttaggcttcgctttcttttgctgcgcctgactgattttctgttcctcggctgcccgcgttctgccttcaatctgctcgttttgatatttcttcttttctttctttgaaagcttgttgaaccaatccacaaaagctttatattctttcacaacggctttcgtttcgtcgaacatgcgcatttcgccgtaatgcatccaagccacccgatcacacattttctcaatctgtccgatggaatgactgacgaaaaagatcgttttgccgcgttctttaaattccgtaatgcggtccacacatttctgatagaaagtctggtcccctactgagagcgcctcatcaataataaggatgtcaggatccatatgcgccgatatggcaaaaccgagacgggatttcataccgcttgaatagcttttaacaggctgatctataaagtcgccgatatccgcgaattcaacgattttttcataaagctcgtctatctgccgattgttgagacccatcatcaagcattttaaacgaatgttgtctttaccgcttaattgattgtttaatccggcagaaatcgcgattaaagacggctgcccgttcatatcaatctccccgcttgtcggcggaatgatctttgcaagcaaattggacatcgttgattttcccgagccgttgatccctacgaatccgatcgtttccccttcatagacgtcaaaagaaacatttcggacagcgaaaaaacctttttgatttctgtttgggaaaaacagtcctttaattttgtcagactgttttttatatagaaaatactgttttgaaacatttctgaacgaaacttttagtttcatcgtataatctccttactatattaaagaaagtcaacaaacttatctctgaatttcatatgaagaagtgaaccgactgttaataacagcagtgtgacgaaccagaaatacagcgtgtatttcacatcgtggaaaaaccactgcccttccataaagctgtctctaaagccctcgataatatagaaaagagggtttaacttcaagatggtcaaaacttcaggtctgtttccgaatttctccgcaatgtcccagaaaatcggcagaagaaaaaagagcagccttgtgacggcttgaagcaaaaactgatagtccctgattaaaacgctgatggttgaattaaacaggccgaaagcaaacataaaactgatcatgcaaaacaagtaataaatatattgcagccagtgaagcgtcggaaacagtccgttgctcagcagcacaataatataaatcgccatcatcacaaagtaactgaataaattcgatgctatcactacagaaggcagtgaactgatcggaaagttcattttcgacactaaatttatccgtttaaaaacgctgttagatgcatccagtatcgtcggactgataaagaaccaaggaattaagccggccagcatccagacgatgaacggtacgctgtctccatttccaagcaccatatcatgtccgccgcgaatcccgagaccaaatacgaaccagtaagccagcatttgaatcatagggttgagaaactgccacaatatacccaaatagttcacttgatactttgatttcgtttcgtacactgcaagccgcataatcagcggaaatgagttgaattgctctttcagaatttttaccaatgcattcattctaatcttccttagtcgtaagttttaggtaatagctttgacttacaaaagcaccgctcataattgtaacagattacgatgtatttttcacttcataacaagcctgaatcccatgagcgcaacatgccgtcacttaagcaaaaaagcataattaacgtggttaaattatgcttttttgcacctatttacttgtccccgaaaatcacttttacggctttttcagacgattctccggtttctaaataacagaacttctcgtaaaaaggcccgaatgaatccggaagcttataatcatctgattccgtttcattgacccatttgataacgtcacctgtttctttgacaagcgggccgggcgcttctttttcaaagtcaaagtaaaaccctctgagtttatcccggtacgtttcgatatcaggcacataaaacagcatcggtcttttcagatttgcatagtcaaaaaagacagaggaatagtccgttatgagtaaatcagagaccatatacagctcacggatatcttcgtagctggagaaatcataagcaaatccttcatacggtccgagatcaaagttttccgccacgagataatgcattcgtaaaataatgacataacgatcgccaatcgcttctctcaattgatgaaggtctaaatcaaggtcaaacttgtattttcccttcttataaaattggtcatcccgccatgtcggtgcgtagataatcacttttttatcttgcggaagattcattttttctttcagcgctttgatgacagaagggctgttatccgtttgaaggaagtcattccgcggatatcccgattcaatcatggttttattaaactgaaacgcccgggcgaatatttcggttgaatatgcgttcggtgaaatcaggtaatcccactttgaagcctctgtcgtaaagttgcgcttgtatttttcagtgtttgttccgggcatatgcacttcatccatatctacggcaaggcgctttaaaggcgtgccatgccatgtctggacatatgtcgtatgctcaggtttcggaatccacagcggcatacggctgttgacaacccagtactcggctcttgccatggcaaacagccatttgaacgtaaagcgttcgatataaggaattcctttatctttaaatgtctgtgagtaagcgggatttacactccagcagagacggtattccggcatctctttgctcatgtattcataaatcgcccgcggattgcagctgtactgttttccggcaaagctttcaaacatgacaaatttctgtttgacaggcagtttccccgcaaccctgaatcccgctttataagtgttttgtattcttttctcaatgaactttttcagcttattctttctcttgcgtacaaaggaagcgccccgtttcagctttcctttcacaaaatactccacgcgggtgctgaagctgtaatcgttcattctcaggtggagatttttcgttttctttttcgtgaaaacgtgaaatctggcaggccctttctccgttttcaggatcgtgaattggttagggtttacttgttcagatttcagaacctttaacggtttgctgttggtgataatctcttcacccgtcccggcatcttcaaaaatgaattgaatatggaattgaaagattagctgctgattcaattctttataaacggcattcaaatcaatttttgtatcaaagcctatcgtgtcaagcatcgttgtgtcctgaacatattcatcaaggtcgtgtctcggcacgtcgtgaagcggatacttcagaatgagaggctcctcttcttttccttttttcattttcagaatcaggtttttttcttttatctttaaggtttctgccgcattcagccggaatgcaaaacctttcagatgtaagctgccgtcagattcgagctccatttcatcaatccgcgtgacgaactttttctgcagcagctttaaggagaaattccctttcttcgtcgtgtaagggaaaaagaacatatgatgagcctcatctttataagaagacagttcaataggttcaaggctggattttaaccgttttttactgatatcactgtcatcattgataaaggagacatagaaatccagacatcctttgccgtccgtatggtcagaaagcagatccgtgctcataacagcatggtactccccgccttctccggccaaccgtttcagagggacggaaagttccgcttttgtcttacgatttataatctgaagagaaggctcttcccctgcagtgacattttcacaggatatcgtaatgctgaatgtctcttcctttatgttaagatgttttaacttgtatctgacaggattttctatacccataaaataagtctactcctctgtttcaattaaacatatccaatcacaatcatcattttgttactttcagcgaaaggttctccttcaccgtccggtagaattgatattgcagtccgttcgcttctgcggtcaccttttcaccgtcgtctctgtttaacatgacacgttcataatcgttataaatgacatacataatataaccgccaagtccgactttttcaatgtcacgtaacgggatttcaaggacgtaccgcccgtctcccagtgactgaaccggaaactggtggtgtactttcatgttatctctgtgctgaaacagaatatattgggcattatttctgtcctgtccgaacaagcggaacgtaacggtgaatttatgatcggcgaacaccgcgctttccgtttctccgtgcatgcgaagttcgaccagtttattttcttcatccgtcagcgggctttctaaataagccagtccgccttgcgtcacgatggttttatcgggctcttttttggaccagcggaacagcttttcgacctcatcataccgtttttgagtcagcagacggaaggctgtcttatgaatcggatgaaaaaatgtctcggaaatatcgtatttcgtcttctttaacacattcagaatttcattgaatttattgtagtaggcttctttgttttcgcttttcaggaagtgcatccgatcgaaaagacgcgtaatggaatcgaattcgatcaggcggttcatcgccatcttctctttttcagtatctaattttttgttcagaatatacttcattacggctatgttcgtgtcggttttttccattatattagtctgctttgtcagcgactcattattgtccattctgttcagataatagaccggttcggttgacgttgaaatatctccgcacgccaaaagaacatccataaaaaattgcttatcttcagcaaatttcatttccggatatctgatatcattatcttttagaaattgtaagttcatcattcttgcccgcgggccgagatgatagaaaatatgccggattgaaaaaggcgataccttcgctctgttcagagaagactcatgtttcccgatcgttttttgaccgttcacctgcatttcgatcgtttttccgaccgcataatttacctgatctctttcaagcatgtcgaataagattttaactccgttcggcgcaaaccaatcatccgcatccaaaaatgtaatgtactttgcatttgccagctcaattcccaagtttctcggataagccggggtccccgtgttgtctttcaaaaagacgactgtaatattttcatacaactcggcgtactcagtcaggatgtttctggaatcatcagtagagcaatcatcgacaagaattaaagaaatatgctgaaagccgatgttttgaaggatcactgaatcaactgttttccttacatattcttctgcattataaacaggaacgactaccgctaccttcttctcttccgccaatgcttctttgtttaaaatggtatattcgcgttcttctacggacggcttggactcttttttattcaacttaaaaaagttactaagattcatctttaaattctcctcttattgtctagctttttttcaaaagcgcataacaaatatagcgaaaataaccttatattacaagaagtactccctatccggagggagtacttctttatcatctgtatatccgaatgtttcaattacaccccggcaatttcttttttaatctgtgtggtggaaatgccttcggttctagggaggtagatgacttcgcattgatctttaaggaaatcgaatttgccttcccaatcgtctcccattacgaacacgtcgatgttgtgatccgctacgtcacgtactttttgatcccagctgttttccggaatgacttcgtcgacataacggatcgtttccagaatcagctttctgtgttcatagctgtggtaggcctttttttgtttttgcaggttgaactcgtctgttgagatggcaacaacaaggtaatctccaagctgctttgcgcgctcaagcagtttaatatgaccccaatgcagtaaatcaaacgtaccgtaagtaatgaccttcttcatgaaacaaaagctcctttctatcatcatacgtataacaagcaactgctctgaaatgctgcgcagctgtatccttaatcactaaagtgccaatttcgtactcatggaacctcattatatcacatagccctgaaaaggttaagccaatgtaaaacgaagttaaaatccacttattaacaaatgttattacaataggagtttagcagggtttttgcgcgtatgattaaagaaattgttatcttatttatatttttgtaaaactattgttaagtttatctgaaggtattatgttaaaataaagcttagcctaagtcacgaaaaagtgaaagaaaatcccgtacaaaaaggaggacggcagatgcagactgaaatggtgcacaacctttcttacgttaatggaaatttacaggagtttatttcatatttagacacttattatatcgcacaaaagcaaggagccgtcattgcgacggtcaatcctgagatcggatacgctgcggcgaaagacaaaggttatcatcaagtcatttcttccgcggatttcgtcctgccggatggtatcggcgtcgtgttaatgtcacgtttgacgcagcacccgctgaaatcaagaattgcgggattcgatgtgtttcttgcgctgctcggcctcgcaaaccggcagtctaaaaaaatatttttatacggagctaagcaagacgtgcttgacgccgttttgaaccggatcagcaaagagtatccgaatattgaggttgtcggagccagcaacggttatgaagcggataaacgcttcgtcgccaaacagatttcccgggcgaaacccgatctcgtgtttgtcgccttaggatatccccatcaggaacaatttatttatgaatacaaacatcttttccctcaggctgtatcgatcggtttgggcggaagctttgatgtgttcagcggaacggtgaaacgcgcccctgaatggatgatcaaaacgaatctggaatggctgtacagactggtgacgaatccgtggagatggaaaaggatgctgaacattccgaagtatgcttttaccgttttgagaaataataaatcaaataaaagcctgtattccaagcaggccgaagatcaaacgaaacagctttaaacaaataaaacagcaaaagagattggtaatctatgaacttgcgatctttattcgccgctttttattctatatatctgtctgttctcggcgttttgttcaagcctgtaaagcccaagaaccatctgaccctgctggtatcttttgaagagaatgcgcaggctctcatccgttcttacaaagcgcacgctgaatcgctttcttatgaaatgacggttttgtatacgagacacgccgtcagtctgaaaaaagagctggaaggtatcggctctttttatctgaacgaaaaacatccgctgcatcttttgaaggctgttttgatcctttttaagagcaaagtggtgataacggataactatttcctcatgacaagcgtcttaaaccgccggccgcaaacgacatgcattcaggtgtggcatgcgaacggctctttgaaaaagttcggccttgaggatgtgacgaatcaaaaccgcccggcatcagatatcagccggtttaaaaaagtgtaccgatcgtttgactttgtcaccgtcggttcagacgcgatggctgacgtttttaaaaagtcgttcggcatacgggacggccagctgttaaaaacgggtatccccctgactgacgtctattatgaagaacacaagccggaactgaagctcaaatggccgaaaaaaatcatcctgtacgcaccgacattcagggattatgatatgcagtcctttcggctgccattcaccgaagaacagctcacaaacgcgttaaacggagagtatatgctgcttgtaaagcttcaccctgccgttttgcatcagatttcggcttcgtttgaaagcgaattgatcaagaacgtgtctgacatgcgtcttcatgatctcttgaaagcggctgatattttaattacggattactcttccgtgccttttgaattcgcgctcttaaataaaccgattttctttttcacgtatgatctggaggaatatgatcgaaaacgcggtttaatcgacaattatacttccgtcattcccggaaaggcttgtcatgacagcgaagctcttctggaggaaatgacgaaaaagccatttcgtgcagaagaaatgaagcggttctcggacaaatggaatatgtattcagatgggaattcgagtgaagcgttattgaaatttgcggaaacaaaaatgaaaaattgtgctgaagcacctgcctgaatccgacggcgggtgttttttgcatgaagaaagggctgaagcatacacttcagccctttttttatactttcataaacacgggaacatcatagtaaagcgtatagtcatccagcagtgagtataagctgtacatgcggtttacctgcttatacgcccagccgatatctgtcgcatactgatgggccgcggctggagaccatctcattttatacagcgtatcctgctcgtatgaaggattgtgaatataagacgcaccgataaattgggctccgccgataatcgcggcttccggagtaaaccagccttgattatacgcgtattgtgcgccgtagtaattcgggttgctgtcataagccccgatgccgtacatgttgtaaacctttttaccattatacataatgccgttcgcaagctctgacgtgccattgccagtttcaagcaaagcatgcgaaatcaaatacacttcattgatgctgtatttgccggcggctgtaataaaggcctggcctttccctgtcagtattcctttattgaccagcactttttgattcagttccgatgcgttcagtccggctgtctgagagagcttcagaaattgaaagtaatacttgctgtcttgtgcgaagtgagccggattgacatactgcccgacttcgtcactgctggcgtttctccagcccatgctgagtttggcccagccgtttgtctggcctgtgatgctgactttatcgccttttttcaactgcccgataatattgccggagctgacttccggggttgaccggacgttcaggacgtcggctgtgaccgttccggaggccgtattgatgtacgtaagcgatgcataagccgcggcatcagtctgcgggctgactgtcatttgttttttgaccatatctgccagcgagatgttgtaattggtattcatgatttgcggtccgttttttattttcaaaatagccatcgtccatccgtacagctttttcagcttttgggaggcggcgtccgctgactgcgctcccgtgaattgatcgcgaatgcggagttcataaaccggatggctttcactcgtatagccggcctgtaattgtttggcgctgaaaaagctcatgcttttatttaaaacggttttactgctgaatgtatcggttttgatgacgtactgtgcagagccggttttccccgtctccttcacagtgccggccgctttgttttgcttgaaaaaagcagtcacgcggtcaatgtcttcctttttaagcagcggtgccgtttcaattctgaattgtgtatacgctgcttcacctgttttctgtgcggaggcggatacttttttccctttgaaaaagtccagcgaacgattgatctttgccttatcaagcagtgattcggttgtgacttggtacgttgtgtccgtctgcttggatatcgtttttgaaatagcagtcagtttatatcccgccagcagattcaatcctttttttatcttcgactggtctgccgtctgctgagaaagcagctgatattcgttttctgctgtttttcccgccgctgttcttgccgtctttacatgctgctggcggaaaaacgcctccgcttgatctgcctttgcagcggtaagctgccctgccgtgatccgataaacggacactgatgctgtctttttgacaggcgatgcgtcgcaatgccattttttctttttaaagaaagcttgaacactttgcagctgcttagccgtcagtccgctcatcccgaccgtgtaattatttttcttgccggctttttgatagcttccgctcacacccgtattcttcttgatttgggtgatagcattttgtacggcccctactccgttaaaatatcctgactgcacgttgtacacggttgctgttttgctttgggcatacttttgaacattccctttgacgccagttttctgctgcagctgtttcgctaaacctgccgcatcatttgcatttgaaatgtcagaggctgtcacggtgatattcggactggcctttgccgtgactttcagcgacgcctgcaatcctgtttccttttgaaaatcagtttggatttgagcggctttttgatcgccggagattgttcctgattggatctgaaaccgggctgtttcccgtttgatctgacggtatgacgctctcacgcccgtctgcttcgtcaacgcttgcgagagcgcttttgcgtccgcttcggccgccatctcagcagtcacgacctgcatgtacggctgttttgtccccgccggcttgacggcgccggtcacgcccgtttttttcgtcagttcggcaagaagatttttcgtctgccgctcgtctgataggacgcctgatgtgacggtcacgtacggctgtttgcttccgcttgcgctgtaagtgccggacacgcccgtctgcttcgtaaaatctttcagcacggttttcgcatccgtttcatcgtgtaagcctgaagctgagatttgataagtgagcggcgtatttccggctttctttgcgtcagcctgccaccccgtatcctttttcaatttcgctgccgcttgaagcgcctcgttctcagaagcaaattgctgcttcgtttccagctcgtaaacggagtagtcgctgtatgcggcctcagcgggctgtgtaagggtgcaaaagacaaggaaaacggcggacaataacataggtgcaacgaatctctttttcattccttctcctctttctgattcaattggtttctatcaaactagtttatttatcggccggccttcttcatttttacagagagaaatcacccaattttccaaataaaaaaaacttaatcccagagctgggattaagtttggttttatatatgagaaacgatgatcgtgcaatctccgtttatcgtaaagtcaggcatctgatccggcagtatgaaatgcgcgcctttttcaagcttggcggacttgccttcacagaggatggagccgcttccttctgtgacgctgcacagcataaacggagcgtcctgggtcatttccgccgtcccgctgatatcccatttgtatacagaaaaatattctccctgcacaaaggttttgatggtgacgccttttctcgtttcagttgattcatctaaaaatccgtccacatgaggaacggtggcggcgttgacggcatcgcggatatgcagctcacgcgcctggccggtttgatctgtacgcccgtaatcatatatccggtaggcggcctctgaattctgctgtgtttcaagcacgagcgcccccgcgcaaatggcatggatggttccgctcggcacataataaaaatcgccgggtttgatcttcacacggcgcagcaggccttcccagtcaccgctgttaatcatggtgacaagttccgctttcgaacgggccgtgtgaccgtatatgatttccgcattttctttacagtcaataatgtaccagcactcagatttccccgtttcgcccagtccatgctcctcagcgtcataatcgtcaggatggactttaacggacagatgttgtttgacgtccagtattttcgtcagcagcggaaaccggtccccttccgttccgccgaataattctctatgctgatcccacagttccatcaaggttttcccttgatacggaccgcttttgaccgtgctcattccgtgcggatgggctgatatcgcccagcattcgccggttgtttctgaaggtatgtcatatccgaatcgttcgcgtaataacgtgccgccccatagtttttctttacatacaggctgtaaaaaaatcggctcttgcgtcatgttcgttcccctccccttaaaaagcggctcatatcccattccccctgtgtcttttttaaaacacggagggagccgcggttaaaaacaatatgtataaaatggctgacctgctcattataccattcggatggggcggaatgctcagtcatttcctattccagaataaaatgccttgtttgtcgcaaattaaaataactgatggaaaggggggaacattgtgacgatacatgcggagctcagcaaaaaccttgaagtgctgaaaaaacggttcggccaaagcgatgacatgatgttttattcgtttacgtacggaaacggcaaatgtgacgcctgtcttatctatatagacggactgaccgacaatcaattgcttgcggaatatattatttcgcccgtgcaggcggccgcccggcatcaagaggaaccggctgaaataccgccgtcatccatctctttcggctatcgtcatacccggctttcttcacttaaggacgcggaggcagacattttctccggcaaatcggttttgctggcggagggatggggggaagccctttcgtttgagacggaaacatttaaaatgcgtgatattgaagaaccgtcttctgaagtgcttgaacgggggccgaggataggttttgtcgaaaagcttcggacgaacacggcgcttttgcgcgagcagtccggtgatcccaacctccagatcaaagagatcacactcggcgaacggacaaaaaagcggatcgccgttgcctacattcgggatatcgcgcctgatgatgtcgtaaaagaagtgatgaaaagactggagtccatcaccattgacgacatcccggaatcaggagcgatcgagcagcttattgaagataacacgtattccattttcccgaccgtcttgacgactgaacggcctgaccgggttatgggcgctcttttggagggaagggtttccattcttgtagacggaacgccttttacccttttggtgccggctaccgttgatgaatttatccactcccctgacgattataatcagcggtgggttccggttacctttctcaggctgcttcggtatacatgcattttaatcacgatttatttacccggcctttacatatcgctcgttacgtttcacacggggcttttgccgacgagaatggcggttacgattgccggaagcagattgaatgttccgttccccccttttgttgaagcgttcatcatgatttttacgatcgagatgatcagagaagccggactcaggctgccgaagccgatcggacagacgatcggcctgatcgggggcgtggtgatcggacaggccgccgttcaggcgaatattgtcagtgcgatgatggtcattgtcgtatccgttacggcgttggcttcttttacggcgccctcctatgcgttcaattttccgctgaggctcatccgtattttttcgatgattttgtcggcgatattaggtttatacggactgatcatgtgctatctgcttgtcatcggccatctgatgcgtctgaaaagcttcggtcaggactatcttattccgatcatggcgcagcctggccaggacttaaaggatacgatcgtcagactgccgacgcctcttttgaaaaaacggccgaccagaaaagagacgaaagataaaatcaagcaaaggtgatccccatgaaaaaaccggaagacaagctgtcgtttatgcagacacttctcatggtaagcggaacaatgatcggagcgggcgtgttaacactgccgcgctccgccgcaacagcggacagtccgagcggatggatcattattcttgtgcagagtgtcgtgtttatcggcatcgtcctgctctttatgccgtttttgcagaaaaacagcggggaaaccatttatgagctgaatcaaagcatcatgggccgcgccatcggttctcttctgaatttattcatcagctgttattttgtcgtcaccgtctgttttcaagcccgttttctcggtgaagtcatcaattactttttactgaaaaatacgccgatgggtgtcgtcatattcatctttctggcggtcggcatttaccatgtgaccggcggggtctatcccatttcaaagctttatgcctatctgtttccgattgcgatcgtcattctgattacgctgctcatattcagtttgagactgtttaagctggatttcgtccgcccggtcatggaaggaggctacaaaagcttttttgagctgtttccgcggacccttctgtatttttcgggacttgaggtgattctttatctggtgccgtttatgaaaaacccgaagcaggcgaaaaaggcggctgtcttcggcatcgcaggcgcgaccattttttacagctttacgctgcttgtcgtcatcggctgtatgtcggtcgctgaagccaaaacggtgacgtatccgaccatttccctgattcatgccttggaaatccggggcattttcatagagcggtttgatatctttcttttaattacgtggacatgccagcagttcacctgtatgctcggttcttttaaaggggcgcatctcggattaaacaccattttcaaactgaaaaataaaaacaatgcctggctgctgggaggcttattggcagtgacattcggcctttcaatgtaccccgatgatatcaacagtgtgtttgcattcgcgaatattctcggatatgcgttttttgccgtcattatgattccttttctcatctggtttgtcagctggatgaaaaaaatagccgggaggaaacagacgtcatgacacttttcataaaatgggcggcggcgcttttcatactgatgacgctttcaggatgctgggacgcgaaggaagtcgaaaagctgtctttcgcccgggggctggcgatagacgagacgagtgaccgccgatataaattaacctatcaaaacctgctgccccaaagcgaaaacagccaggcttccggccggcccgtgtttgtcaatgtgacgacgcggggggataccattcttgaagccgtcagtgaagtctctttaaaagatccgcctgtttacagcgatcatttaaaagtgctgatattcagcgacaaattgctggccgaccaaaatatactgcagatgatgaatcattttatccgcgatgatgaattaaggcggagcagctacctcttcgcggcaagaggaaaagcgtccgatattctgacggagccgacgccgaatcagcagcagcccatggccgcggaaaagctgatcgaccttacgaacaacggcggctacaacgggaagattttaaaaccgctccgaatcgggagagcttcgatttactgccataataaactcagttttctcattcaggccgtcagcaatcaaaaaggaaaaacggtgtatgacggagcggccattatcaaaaacgcaaaacaaaacagattggcgggatttctgtcatcatacgaaatacagagcctgaattggctgatggggacgatacggggcggcgtgctgcccgctttggataaaggggggcacccgattaccttcgagatcaaaaaatcaacatccgccatcactcccaggctgaaaaacgggaagctgtcatttcatgtagcggtaaaaacaaaaggacttttgtcagaggatcaatatgccggagaagattcattcgatcagcactatttaaacgggctggaaaagatttttgaaaaaaaactgaaaagcgatgtgaaagaagtcatcgataagctgcagaatcaatatgaaacggacccggtattcttttctgacagagtccgcattcaatatcccgactattggaagaaagtaaagcatcattgggatgagaccttctccgaagcggcttttgactatgatgtttccattcagattaccaacttcggaacgatgggacggtagccttcagcctgttttttcgacacggaggagaatctgataaatccggctttgttcgggcagctgtgtcaccggaaattgcatcgattgcgccattcgtgtgatttcctgtaaaaacagctgcacccgctcatccacgtgaacatacgtataggactgctttttcacagcaaatgtctcttccggaaagagcgtgcgcaccgtctgcggcgtaaaaaaccgcaagtgggtgcggtcgagaatgccggcgtctctgtatgtccagtcaccgagcagaagcggaaacagcgcttcggcgtgggaaatattcggaatgctgcaaacgattgatccggcaggcgacaaataggatgagtacgtttcaatgacgcgccacgggtcttttaagtgctcaaggatgtccgcgaaaatgatgcaatcaaaaaagccttccggataaggcagcttcacttcttcgacatcttcctgcagcaccgcttcatagtgtccttttgccgcttgcgccgccagcgggtgcagttctattccgtacagttcgcaaggctgtctgttttgaagttccagccccgtagctcccgcaccgcagccgacatcaagtatccgtttcgcctcccggggaacgagctccgcaatttccggtctcggatgagtaaagtacgtgaaatcagtgccccatttttccgtaaaacgctggcggttctccgaatataactgattgatattgatatcctgattagccgtaaacgtcgcgtgcccgtggtgatgcacaaaggcatcgagggcgatgtgcaggctgtagcctttttgcagggcgcgcagacataggtcatcatcttcaaaagaaccgtatccgaattgttcatcgaacgggccgatgtcttcaatgacgcttcttttcaccagaagacagaagccgacaaggcgtagcacccgctttgtatgatgcttttcccgttcgcaatacgcctccgcgaatgactccagttcatcaagcgattgatatgcgtcatggatcatttgcgcgccgctgacatagttgctgacgggcccgaccataccggttttttcagattgatacagcaccctcagcatggaggtgagccaatttttcgtgaccatcgtatcgttgttcagaaacagcagattttctccccctgccgcttcgattccctggttgcaccccttggcgaacccgaggtttttttcatttaggatgactttgacgtcaggcagatttgatatgtattctctcgttccgtctgaggaaccgttgtcaactataatcagttcaatcttatctttgtcggtgtatcgttcaatgctggccagacattttttcgtcagctcaagttcattatatgtaaggataataatactcgttttcaccggcatccccgcctttatcgtgactttatacaacgtatgacatatccccgtcatttatgtgaccgggcgcccgcacggcatccgttttgaggggccggtgaataaccgccccctaaaactgaatattacggatgaactgtccgccgatttgattctgatcccgagcctccgttacggcttttcagatcctgctcaatttcttcaaggcttttccccttcgtctcggtcactttaaaccggacgaacaggaatgccagtatcccgatcgcggcataaatgagaaataaatagctgatgccgactgcttccattaacatcggataggttaatgagacaatcaatgttccggcatgcagcatcaaagtggagacacccgtcccgataccccggacatgcagcgggaataattcaggaagcatgacccacacggcaggcccccagctgaccgcaaatacaacgataaacaggcctaaacaaatcaccgttgtccatgatgcggctgctgaatgttcaaagaaaagattgaccgcggccaatacgagcagactgatgaccatgcccgcattaccggccagcagcagcggcttccggccgatcttatcaatgactttaatagccgcaagcgtcatgatgacattgacggcgccgattccgaccgttcccaatatagacgcggaattgccgaaccccacactggtaaatgttttcggggcgtaataaataattgtatttgtcccgatgaattgctgcaaaaaggcaagtccgaggccggcaatcagcgcgggtctcacccacggctcaaacaattctttcaagccgccttcgttttccttttccgcttctttcatctgatcaatctcatcatcaatattcttcgttccccgcaatgatgaaaggatttctcttgctttctcttctttgccgatcgtaaacagccagcgcgggctttccggcataaataggattccgatcagcagaatgactgacggcacaaccgcaagtccaagcatccagcgccaagcgcctgcatcggcaaatatatagttcacgatataagaaacgaggattccgaccgtaatcatcagctgattcagcgaagaaagcgccccccgtttatgcttcggagccagctccgataaatagagcggaacgatcgttgtagatgttccgacagccagtccgagaatgatccggaaaagaaccatcacctctgtattcggggcaaaagcgactcctaaaccgcctatacaaaacagaagcgccgctcccatgatggccttccgcctgccgaaccggtcggtcagtttgccggcgaatcccgatccgagaatcgcccccgccaataacgaactgacgacgaggccttctgtaaaggcgttcagtcccagttcttttttcataaataaaatagctccggaaatgactccggtatcatatccgtataacgcgccgccgagtgcgccgaaaaaatagagccatttattcgagtgtatgcttttcatgttatgtagactcccttcatccaacgctgtatccgcgcggaattgttctactgcttcttttgcctgtttccgtccgtttcaaaccttccgcaccgttaatatccattattttactaattattttttacaaagcgacgaaacatttcccgcttcctgccgtccaatataatgtgaacctgatgcaaaaataacagtagatgttgtcgaaatagagagaaagatttggaattttctcatttgcagagttgctccaagtcaacaatcatggtacgcttcacaaagaatagaaacgagaggtaatgatatggaagaacgatctcaacgcagaaaaaagaaaagacgcctcagaaaatgggtgaaatttgtactggtattcgccgctttcttattggtgatcgccggttccgtcggcacctacgcatttgtgaaattgaataatgcgaccaaagaagcgcacgtcagccttgaccgcggcgaccagtccgtaaaacggatcaaagaatttgacccgaagaaggattctttcaccgtattgcttttaggaatagacgcccgtgacaataagggcgaatcagtagatgacgcaagaagtgacgccaacgtgctcgtcaccttcaaccggaaaaagaaaacagcgacgatgctcagcattccgcgggattcctatgtcaacatcccgggacacggctatgacaaattcgcgcacgcacatgcttacggcggttataatttaacttataaaacagtagaaaacatgcttgatattccggtagattatgtggttgagagcaacttcgacgcgttccgcgatgtcgtcaatgagttgaacggcgttacggtaaatgtgaaaagccagaaaattgccgatcgtattaaagtcgatacaaaaggaaaagtcgtgctgaagccgggcgtccagacgcttgacggtgagcaggcactggcttatgtaagaacacgcaaagcggacaccgatctgatgcgcggacaaagacagatggaggtgctgagcgccattattaaaaaatctaaatcgttaagctcgatcccttcttatgacgatatcgtcgacagcttagggaaaaacttaaaaatgaacttatctcttaatgacgccatcggtctgttcccgtttatcacatcgctgaaatcggtggattctttgcagctgacaggttcagacagctatatttacactcctcagtacggcaaaaatatttattacttcaagctgaatgaggaaaaccttcaagaagtaaaaacaaaattaaaaaatgatttagacgcgtaagacgtcacggcggggttttagaaaccccgccgtttttctgttgaaaaaaaggacatgaaggtatagccttttaactgaaggctttctgctgatttcacacaaagctgaacatactacatgaagcagctttatttttaaggagggcatccatacatatgaaattgatagccattgacttagacggcacattactgaactcggacagtgtgatttctccggaaaacagagcggctttacaaagagcggatgaagcgggcattctcgtggccatctgcacgggcagagccacgtttgatgtaaaagcgctcttgaaggatttagatattccgatcattgcggcaaacggcgggacagtccatgacaaaggataccgctccgtcagccggctcttaatggatcagcaggccgggaaggatatcgccgcttatttaacggacaaagacatttactttgaggtctatacagatgatcatctgctgtccccatttgacggcgagtccaaactgcaggcagaactggatattctgaaaagcgccaatcccaaggaagatattcagacattatgggagggcgcaaagacgcagttcaaacaattcggcattaaacccgtacaggatatacaggcgatttttaacggagacgaacatgtttacaagcttctttgtttctcttttgatatggaaaaactgagaaacgccaaagaagaaattacacatcatccgaaattatcccagacatcttccggaaaacacattatcgaaatcctccctgccggttccggaaagggacgtgctctgacggagcttgcctcactgtacggaattgaaaaacaggatatttacgccatcggcgacagcccgaatgatttctccatgtttgaagcggcgggaaaccgcatcgccatgggcaatgcgattgatgaactgaaggaaaaaagcacgtatattacaaaaagcaacgatgaaaacggcgtcgcatatttcatcaaccggcttctcgacaacgatcaataaaaggaaaaagccaggtctttcacggcctggcttttcacgttttccaaaaaagaaattcccaaaaatgaaaataaattgtaagataaagaaaaaaggagtttcatgatgtcgaatgcaatcgctattataggatgtttagcttttctctgcgcagtcggatacggaatattccacctcatatgcaaagctgccaaaaaagaaaaacgtttttcaaaaaagctgttttggccccttctcatcggcggatttatcctgcttctgaccggcgcctccctcgcagagccggacgcctcggccgtgaaggcagaggagaaatacagcacccttgataccgcttatcaaaaattgacgaaggaacaccaggcgcttgagaaaaaatatgaaagcatcagtgccgcggccgaaaaggagaaatccgaagccgaagccggcaatgaagaaaaactcagcaaactcagccaagagataagtgagctgaaaaaaacaaacaaatcactcaaacaagacaatgagaaattaaaaaattcacaaaagaagctcgaaaagtccgctgaaacgcttcagtcagaaaataaaactttaaagcggcagaaagcagaaacaaaaacatccgaaaacgcggaaacggcgcaaaacaacgccccttcctccggcggacatgccgaaacgaaagcagccggcacctcacagggatgcgacattaaaggcagccggaacggcatttatcacacgccgggaagtacatactacgaccggacgacagatcccgcggaaatgttctgttccatagaggatgcggtagcggccggatacagagcgccgaaacggtaaaagaaaaagacgtcagagacactctctgacgtctttttttacggaagccggatcccgcccgcatatttgtccttccaataagcgcttgtgttcatatttgttatggtaacgcctgcggacacggtgacatgaatcacttgtccgctcccgatataaatggccggattcaggctttccgctttaaagaagaccagatcgccgggcttcagatcttgtttatcgaccggaacgcccgcctgcatctgcttgtccgcataacgcggcaggctgattcctttcgctttttgatagatgtattgaacaaatcccgccgtatcaaagccggtttccggtaaaacgccgcctttcagataagaaattccgatatgatcggccgctgtggacacaacgggattttctttagaaatggctaaattgctgaatcggcgcacacctgtaaaatgttttttccagtaatcttccgacaagtaagaaatggtgactttttcggagcggcttgcttggatgaaccttccctctcccgcataaatgcccgcatgggaaattccttttttatacgtgtcgctgaaataaatcacgtccccgggctttatgccgctcagtttgattttctcaccgaccagccactgctgttccgctgatctaggcaggtaaatgtgaagcttgttttcaaaaacatattggaccagccccgaacagtcgaatccctcctcgggcgtgcttccgccgaatacatacggaatgtcaaggtaacgggctgcctcctgaacgatcgggtcatcagccagttccggatcttttgtaatccgctttgcgccaagatataaattcatccaataactgcttttttgaaaccgtgtgacggttacgccttctgacggagaactgtgtatcatctctccgtttccgatataaagaccgtcatggacgggtgcgttttgtgttgaatctgactttttgaaaaacacaagatctcccggtaaaaggtcattttctttgacggcggctccgactttccattgatcactgaccgttctcggcagatggatgttctgcctgctgaaaagataatgcatcaatccggacggatcaaaaccgtcctcaggctcttcgcctccgtaaacatatttatttccgacaagtttttgcgcgtctgaaaccatcaggacagaaacttgagaatccgcttcagcaatttccgttctcgttactgcgggtgccacaagacaaatcataaggccggcaaggatgtacttcctccagcttgtgagcatgttttctattcactctcctcatttttagtagtttttacatcggtaacttttaacaaatgtttaggagagcacacaaaaaaagaatgcccgatatgggcattctttactggattcggaacaaacaatatgccggcaagcggaatcatgcgcttattttgcgcccgctgtgtcctcttgctgaatcttttgcatttccgtgtcgattttttgtttttcctgatctgtgagctgatcattgtatttaaacgctgacataaacataaataccataatgatcgcggcaaacggccatcccgctttaatgattttcatttgtttttcactccgctttcttttttaagatatcgctgtgatccacatcaaacgttaattttccatccttgacgctccaatcgaaattcgattctttcgtcagttcacgtacgatcgttttatgattgatgctgccttttttaaccggtgcaggtgttgcttcatgaatattcatcggcgtgacttcaaagcgtcccgtgccgtttttctgcagatgatattgaacaagcgccgtgtctctcgttcttgtccacccctggtcgaatacgaagttgcccaggctgtagaaaataacggtgccgtggtacatttcgatcggttctagcacgtgcggatggtgtccgacgataatatccgctccggcatctgacattgctcttgccaattggcgctgtctgtcattcggatcattatcgtattcctgtccccagtgtgtttgaacaatgacaagatcggctttctttttggctttagaaatcatcggaataaacagctctggatcggccggaagcacacccggcgcatttcgtttagctgcaaagccttttccggaaacatcagtgaaacccagtgttgcgattttgattccgtttacatcttgataagaaatgttctgctcggcttccttcagcgtgaggcccgcgccgacaagttcaagattttgctttgaaaactcttcaaccgtatcccgcattccttgagggccgtaatccatcgcatggttgttggctgccgtgagaacggtgaaattcatgtccttcaatacttttacggcatctttgtttgactgaaggtggatatttttttctgcttctttgtagttctttttatatgtaaccgggttttcaaagttccccgacacatagtcggatgcttcgaagaatggctgtgcgtaacggaagacactttccgtgcctttatgctttgtcactttctcgacattccggcccatcataatatctccgacgaatgaggcagatacaaggtcatcggcatttcttttcacactcggcgtttccgccttccctgtcaggatgcagacgaacatcaggcaaaagacgatcggcagcgcgataaaaacgtgaagattggtcttctttttctgctgtttggtcagcttcagcagtttttcttgaaagcttaattgttttttcatcgtttgacacaccttacattagattaagtagtaagcaaacataatggcaaaagttgcgccgcttaagaacagcgtgctggcaaatgtaatcgttaatccctgtttctgaatggtattggcgatcagacccggtacgatgataccgattccgcggaattctgatatctcaaacggtacgatcgggtaaaggaaatcaagggcgatttttaagcagattcccgttatcagcatagctgcgaattttctgcgtccgtacaaaatcataaatctggataaaccgtatttgacgatcacgtatgtaagaagactcactaacaatacgagtaaaataaagaccggctggttaaaaacgagccctaaataacccggcacgactaaaccggcaggtacgatacctgttttttccgcgaaaattaaactgattaacacgcctaaaataagtgagatgtataaatctgatccgaacatttatccttttcctcctagctaacgagctgtttcaccttatactcttgaattttttcaattaatggttccgctgaaccgtggatattgccgacgccatatatgacacggttttgcattcttgttttcagcacgtccatgatttcgtctgttgatttatattccagatcgtgcaatgtatcggcaggaatcttgccttcttcataagctctgacgatcggttcagtcgtctcgccgataagtatgagttccttcgttttaatgtacggaagcacgtcgtttgcgaactgaatcgttctgtccacacggtcggcgcggcagttcataataacgatcggttcatctgtcgggtagccgatttcctttacacgtttccatatatttaaagtagaagatgcatcatttgcggcaaagccgtttacgaaatgaccgggctccttcgtgctgagcagcggcaggattctcatggcgccaggatcaggcggcgcattcagcattcctttaaacgccgtttcttcatctatcccaagtgcctgggcaacgccgagcgcaagggaagcgttatcaggaaagaccatatattcaaattttcgaaggtattcatctgtaattttagagttatccgcaataataacctcggtattccgctctgcggctttttctttaaagaagtctgtgtattcactgtctgtaatgacaaggtgaccgttatacggtatcgtcgcggtaaatgcttcagcgatttcatcaagcgtcggccccatgacgtccatatggtcttcaagcacattcacgatgacgccgatgttggcttgaaggagttcttcctgaaagataatctgataatccgggtttaccgccatacattcactgacaatggcattggcgccccgttctacggtttccttcattacttctttttgctcgccgatattcgggccctgcggtttccgtttgatcggtttctcctcaggtgtatcccaatagatcatccttgcatctgttcccgtcgtttttccgactgttttgtagcccgcctccatcagtattccggtcgtcagcctcgttacggttgactttccgcggataccattaatattgacgcgtactggcagagcatcgatattcttctgatgccgccttttttcaatgattccgatgattagtacggcagcacaggctataatgagtaaccacattgatttttgacatctccttctgtattgataaattcattcatcagtatatagcttcactatgaattctcaatcggcattatgtaacataatcttcccgctttcactgagccaaacttctctattagtgacgctattcttcctattatcgaattgctttttttgggaataggcaggacttcaaccttacttcaacttttcaaaagaaaaatgaatacgtttacattttcgcgcagaaattcatttggaccaatggaactattcgcgttccggaagaaaaagatgtaatgataatccatcttttccagcccgcttgtatcagcgtttttcgcactgcgcatacgtttcgggactctctgtccgctgtgtgcagactgcctgttttgttaaggataaggtcttaaagtcattcatttttcccccgtatcctgctttcagtcccattccaaaataactagcggaatgactggtacatcacagaataagacgggtccggagtgtttacaagaaatacacattttatatgcggaaagcctttctccttttaaaccatttacaggacgtttatcactcttttgaaataattttaataaatctttatattcgttcaagaaatattcatccataattgtgaagttcttggtaaaacatcgaggaactcctctattttatagaatgcataaaaaaggaatacccgctgaaaactacagataaccagggaaggaggcggtctgatgtctgcggataaacaaaacaaacggattcccggcgattttgaatcggctgtacgggaaatgcaggagctgatgtgtgtttgcggtgattttaaaatacgaaggattaaactgcaggaccgtcataccgctttcttttatattgaacaaatgatagaagaacagaagctgaatgagtttctgttaagcgacaccctgcagaacggcccgcttgaggaaacgatgaatgccgtcagcagtgcggaaacggatgaaatcagaaaactcattgacgggattttggcaggacaggttgtttttctcagcgatgcatcgaggaaagcgaagctgttttccgtcggccagaatccgctgcgttccattatggaacccgaatctgaaagtatcgtccgcggcgcccatgacgggtttgtggaaagtttggaaacgaacattcatcagctgcggtttcacatacaggaccgccatctctccgttcattatatggatatcggggaaagagccaaatcaaaggttgcggttatctttgttgagaatatcgccaatccggagattgtggaggaagtgaagcggcgcctgtcatacttgcgtatagacagcgtgcttgcgcccgggattatcgaggaatcaatagaagataattcgttttccatttttccgcagatcattcatacggaacggccggataaagcaaaagcatgcgtaatggaaggctgtgtactgatcatgatggacgggagtccgtcggctttgattgcgccgatcacattcttttccttttttcaatctccggacgactacagcacgagatggatttccgccagttttttaagagtgctgagatttttcgcctttatgatcgcgattacgctgcccgctttttatatcgcgctgattgcgtttcattttgaagtcattcccaacgatctgattatcaccatgaaaaattcgattgttgatattccctttcccccgctgatagaagccatgattatggaaattacgattgaactgatccgcgaagccggtatcagactgccgagaccgatcagtcagacgatcggcattgtcggcggtctcgtgatcggtgacgcagtcgttcaggcgggactcatttctaatatgatgattatcgtcgtagccgttacagctgtttcttcttttgtgcttccttcatatgaaatgagcacgtccatccgaacgctcagatttccgcttatgtttctggcatcctcgttcggttttatcggcatcgcactcggcttcgggcttattctgatgaacctgtgcaagcttgaatcactcggcgttccttatttatcatctctgacgccgtttcatttcagtgacttgaaggatgcatttatccggctgccggcttggtttattaaaagaaggcctttttatttgagaccgcaagactcaaagcagatgaaacatgttcgggggtggagaaaagatgaagcctaaaaaaataagcccgcttcaaggcgtgtttttcattaatcagacgcagatcagcatcggcattttggcgcttccccatttactgatgatgagatcgggaagcagcggatggatttccattctgcttaccggattgctcgtccagcttacattcagcctgtatatgatattatttcaccggtttccgaagctgaacctgtacgaaatgctggaggaggtgttcggaacacttgccggcaaaggggtgcaggtgctgtatattttatatttcgcgtttctctgcacgctcattctttctgtatttacacggatattggatatctgggtgctccctcagactccaaattgggtgatcagcttaatgctgatcctcggttctgtctatatcgcccaggctccgctgaatgcgatcgccaggttcagctttattttaacgccgtttttgctgctgatctctctgccgcttttatacacgctgggaaaagccgatatcacatacattatgccgatttttcacggaaccgcaaaagacatgcttaccggggtgcagcaaacacttgtcagcattaccggctttcaggcggcgctcgtgatcgggcccctaatcaactgcaccgtcagccagcgctacaaaatactgacgatttcaaacatcttgattatcctttattacctgtatatcacccttacttgctttgtcacaatcagccccgaagaaataaaaatgatcccggagcctgtgctgtacctgttaaaaaccgtttcattcagaattatcgaacggacggatctgctctttttgacgttttggttcgtgaccgtcttttcaacgctggccaacgtgttttacttggcaagcaccggcattgccaagctgttcaatcaaaaagatcacagccggtttgtttatccgctggccctgctcgtcttccttctgtctatttgggccacaagcacagataaaacgatacagcagctggatcagtttttccgcttttccgatattgtgtttgtgtatttgtttccgttgtttatggtattgattgtccttgtacgcaaaaagggtgtccgccatgcgcattaaaaaagcggttcttatcagtctcatgtgcgcaagcctgacacttgcgggctgctgggatcaaaatttgctgaaagatatttctctcgtgctgaccgcaagccttgatgttgatcatgacggtaaaaataaaatcggcatcacctatcggaaggttcagtcctcccaggcggaacaggaaacgggcggctcattcattacgacggtgctcagcgcttccgggcacaccatccgtgaagcgcggtttcaattggataagcttgtcgatcagcgcattgacacgtccaagcaaagagtcttattaatcggtgagaaaatggcggaaaaaccgctttttccttatctcgatgtcttctacagagatccgaaaagcccgcttctcgctcatccggcggttgtaaaagacggcgaggcgattgaagtgctgaagctgatcgtccggcagaaattgatcgtcagcaagtatttaacgaatttattaacaagcgctaatgcggaatcaaatatcagcatggaaaatttgcaatccatccgttcaagcatgctgacggctgataaggatttcgcccttccttatttatcgattaacggacagacgataaaggtagagggttctgccctgttcagcggccagcggaaagtgactgaggtgctcggtcaggattcgaccctcctgacccttttaagcgggcaatttaataaatcggctaatattaatctgaagctgtgggacaaatacaaaatggatattgaaaattatctttctctcggcatcacggatgccacgcgaaagattgtatttatagatacagatccgcagcatataaaagtgaaaatccgtttaaagctgaatgcacgcgtcttggaatatccaaaggacaagctgaattcttatacggcaatcgaccaaataaacaaacaagcctcagcaaatttgaacagccaggccagatcggtgatcagccatattcaggagcacaactcggatatcctcggcatcggccggaaatatcaaacccattattatgagcggggcaagctgctcaattggcgtggggtctatccttccatcgagataatccctgatatcaaagtgagtatctcacaaatcggcatcgtgaactaaaagagaccgcggtctctttttttgttgccaaccgaaatgattcgtgttactctttttatgtaaacggttacatagttgaaggaggagtgtttgttggcaacgattaaagatgtcgcaggcgctgccggcgtctctgttgccacggtttcgcgtgtcctcaatgacaacggctacgtgcatgaagatacacgaacgaaggtcatgcttgccatggagaagctgaattattatccgaatgaagttgcccgctctctttataaaagagaatccagactggtcgggcttttgcttccggatattacgaatccctttttccctcagcttgcccgcggcgctgaagacgagttgcagcgggaaggataccggctgatcatcggcaacagcgatgaagaattggaaaaagaactcgactacctgcaaacatttaaacaaaatcaagttgccggtattttggcggccacccattaccccgaccttcccgaatacagcggcagcctttacccggtcgtatttctggaccggacaaaagaaggcgccccatccgtattcagtgacggacgggcaggcggaaaacgggcggctgaggaaatacttcgcggcaaaagcacaagcatcacgcttgtcaaaggcccagcccaccttccgaccgctcaggaacgttttaacggcgcacttaacgtgctgcaaaaagcgaacgcgcagttcaatgtcatctccgccgcttcattttccatcaaggatgccgccattttagcagaagaattgtttgcagcataccctgaaaccgacggagtcattgccagcaacgacattgcggcggctgccgtcctccatgaggcgctgcggctcggcaaaaaagttccggaggagattcagatcatcggatacgacgatattccgcagagcaggcttttgtttccgccgctttcaaccatccgccagcctgcatatgagatgggaaaacaagcagcaaacctgctgctgcaattgataaagaaagagccgccgaaagagacggccattcaaatgcccgtgacttacataagaagacaaacgacgagaaaggatgatcaccatgagtgaaatttgtgttatcggaagctgttctatggatcttgtcgtcacatctgaacggcgtccgaaagccggtgaaaccgtactgggcacagactttcaaaccgtgcccggaggaaaaggcgcaaatcaggccgtagccgcttcccgcctgggcgcaaacgtatatatggtaggaaaagcaggcaatgacagctacggaaaagcgattattgaaaacctgaaggcaaacggtgtcaatacggaccatatggaaacggttacacataaaaaaagcggaacggctcatattgtgctcgcagaaggagacaacagcatcgtcgtcgtaaaaggcgcaaacgatgacatctcccccgattatgccaaaagtgcgctagcaaaacttcccggcattgatatcgtgctgatccagcaggagattcctgaagaaaccgttgaagaagtgtgcagctactgccgcgcgcagcaaattccggttatcctgaatcccgcgccggcccggccgctgaaacaatcgacgattgaggatgccgcatatcttacgccgaacgaacatgaagcgtccattttatttcctgaccggacgaaagaagaagcgctcgccggctatcccggcaaactgttcattaccgaaggaaaacaaggcgtgcgctactcagacggcaccgcggaacggcttgttcccgccttccctgcagaagcggttgacacgacgggagccggcgatacctttaatgcggcacttgccgtcgcactcgcggaaggacgggacattgagcaagcgctcctgtttgccaaccgcgccgcctccctgtccgtgcagcacttcggcgcccaaggcgggatgccggccagaaaagaagttgaggagctgctgtcatgaaaaaacacggaatgttaaacagccacattgccaaagtattagctgatctcgggcatacagacctcatcgcaatcgccgatgcgggtctccccgtccctgacggtgtccctaaaattgatttgtccttaacggcgggcgttcccgcctttcgggacgtgaccagcctggtagccggggagatggcagtcgaaaaggtgatcgccgcttccgagatcaaagacgcaaatcctgagaatgcaagtttcatagaaagccatttctcagcgcagacgatcgagtacatgtcccatgaggaattcaaacggctcacacagaaagcaaaagccgtcatccgaacgggtgaaatgacaccatacgccaactgcatcctgcaggcgggtgtgattttctagaaagaagggatccagcatgcacatcggcatgacagacattcataaagcattcggcaaaaaccaagtgctatccggcgtctcatttgagcttctgccgggagaaatccacgctttaatgggagaaaacggagcgggcaaatcgacgttaatgaatctgctcaccgggctctaccggctcgacaagggaaacattacgataaacggaacaaatatgagcttctccaatccaaaggaagccgaaaagcacggaattgcctttatccatcaggaactgaatatatggccggacatgacggtgcttgaaaacctttttatcggcaaagagctgacgacggcgttcggcgttttggaaacgaagaaaatgaaagcgctagcaaaatcacagcttgaaaaattgggagtctctcttcctcttgaccgggaagccggacaatgttccgtcggacagcagcagatgattgagattgccaaagcgctgatgacaaacgccgaagtcattattatggacgaaccgaccgcggcgctgaccgaacgggaaatcagcaaactatttgacgtgatgacggcgttaaagcgggacggcgtatccatcgtctatatttcgcaccgaatggaagagatattttcgatttgcgaccggatcaccattatgcgggacggcctcactgtcgatacggcgcatatgaaagacactaattttgatgaagtggtcaaaaaaatggtcgggcgggagctgaccgatcggtatccgactcgcacgccgtcactcagcgataaggtgctcgaagtgaaaaacgcctcaaaaaaaggaagcttttcacagatcagtttccatgtgagcgccggagaaatcctcggcgtttccggcttaatgggtgccggacggacagaaatcatgagggcgctgttcggaattgacaggctcgattccggagagatctggatttccggccgaaaaaccggcattcggggtccgtacgatgccatccgtaagggactcggcctgattacggagaaccgcaaagatgaagggctgctgctggatacgtccattcgtgaaaatatctccttgccgaacctgaccagcttctctccgaaaggcatcattgatcgaaaacgcgaggcggagttcgttgagctgctcatcaagcgtctgaccattaagaccgcatctccggaaaccgccgcccggcatttatcaggaggaaatcagcaaaaagtcgtcatcgccaaatggatcggaatcggcccgaaagttctcatccttgatgaaccgacaagaggcattgacgtaggcgcgaaaagggaaatctattcattaatgaatgaactgaccgatcgcggagtcgccatcatcatggtgtcttccgagctgccggaaattctcggcatgagtgacagaatcatcgtcgtccacgaagggcgcatcagcggagaaatcaatgcggccggcgcaacacaagaacacatcatgacacttgccacgggagggcagcagtatgaaaactgaaccaatgacatcaactgaacaaaagcgattttccattcacaccttcacacaaaaactcggtccgtttctcggcttactgattcttgtgctgatcgtttccgttttaaacccgagttttcttgaacccctcaatattctcaaccttcttcggcaggttgcgattaacgctctgattgcattcggaatgacgtttgtcattttaacgggaggcattgatctctctgtcggagccatcctcgccttatcgagcgcattggtcgcaggtatgatggtctcaggcatcgacccgatcttagccgtcatcatcggctgcgtaatcggcgccgtactcggcatgataaacggattattaatcacaaaaggaaaaatggcgccgttcatcgccactttggcgacaatgaccgtctttcgcggactgaccctcgtctatacggacggaaatccgattacggggctcggttcaaattacgcatttcaattattcggacgcggttattttctcggcattcccgtacctgccattacgatgctgattgcgtttgcggccctgtgggttcttctgcacaaaacaccgttcggccgccggacatacgccatcggcggcaatgagaaagcggcgctgatatcgggaatcaaagtgccccgcatcaagatcatgatctattctctgacaggtttattatcagcgctggcgggagcgattctgacatcacgcttaaattccgcacagccgacggccggggaatcatacgagctggacgccatcgcagcggtcgttctcggcggaacgagcctgtccggcggtcgagggcgcatcatcggtacgctgatcggggttttgattatcggtacgctgaacaacggcttgaaccttctcggcgtatcatctttttatcagctcgtcgtcaaaggaatcgtcattttaatcgcggtgctgctggaccgcaaaaaatcggcatagtaggaggaccattatgaagaaagccatcatcacgatcgcggcattatcactgtttttgctgtccgcctgttcacttgaaccgccacaatgggcaaaaccgtcaaacacaaaacataaaaaagaattcactatcgggctctccgtctccacattgaacaatccgttcttcgtttcattaaaagaaggcgttgtaaaggaagccaaaaaacggggcatgaaggtcattattgtcgatgctcaaaatgattcatctaaacagtcaaatgacgtagaagatttgatccagcagggagtcgatgcgctgctgatcaatccgaccgattcatcagcgatttcaacagccgtcgaatcggcaaattccctcggcattcccgtcattgcgcttgatcgttcagccgaacacggaaaagtcgaaacgcttgtcgcctctgacaatgtcaaaggaggagaaatggcggctgactacctcgccgatcagctcggaaaaggcgccaaagtggcggaattgcaaggggtgccgggcgcatccgcgacacgggaacgcggaacgggctttcatcatattgccgacaaaaagctggatgtcgtaacaaagcaagcggcggattttgaccgtacaaaaggattgaccgtcatggaaaacctgctgcagggacatccggatattaaagccgtgttcgcccataatgatgaaatggcactcggcgcgctcgaagcgattaacagctcaggcaaacacattctggtcgtcggtttcgacggaaataaagatgcgatttcttccattaaaaacggaaagctgacagccacggtcgcccagcagccggagctgatcggaaaactggcggccgaagcggcggagcaggtgctcaaaggagaaaaagtcaaaaaaaccatttccgctccattgaaacttcaaacacaaaaataaccggccgatgtttagacttccggtaaaacgtgaaaggatgaagtaaaaggagagatacagatgaagaaaacagccaaagcggcatccattctgacccttgcagcgggaataacagcggcttcagctgccggaataacgcctcttcccgagacacacgcgcaggaagcggtcaaaattgacgatctgtacagctacccgcttgactcttatctcgtttccgcggaagcattgaacgtcagaacaaaagcatcagcagccagtccgagagctgacacccttcatttaggcgacagcttaaagatcgtttcattccagaacgctgactgggcaaaagtacattataaaaacggaaaaacaggatttgtatctactcattatattgttaaagaagcaacaaccgtaaaaacgacggcaaaaacaaaagtatatacagacaaacaagcggtcaaagcttcccttgctaaaaacacaagcgtttctttcctcggatggaaaaagacagccggcggcggcattgacttcggctgggcgcttgtcgattacgggggcgcaacgggatatatcagcacaaaagatctgcaaaaactgacataatatcaaaacggatttcgcaaattcagcgcgaaatccgttttttctttcttgagcagtcagaaacgtctaaggttcgaaatatttctcaggaaatattgtcggatgaagatgaatgcatacgactctaaaatggcttctttatgtaatccgccaggcgttttgcattgtcacggatagccgcagcatcggcgctgcttaccccgtacatcgcgaaagccggcaaataggtcatacccgtaaaattagccattgcctgaaacggccttaagagctcgctcagtgaaaaatggttagacccgcctgcctgatatgcatcctctccggcacctacggaaacagccagcagcaattctttgccgtgcagcgcctttcctttggagccgtaagcccagccatacgccagcacatgatccatccatgtttttaaaagcggaggcgcactgtaccaatacagcgggaattgaaatacgatccggtcatactgttcacacagctgccgttccttttccgcatctattttcccgtccggatattctttataaagctcacggaccgtgatttcatcatgattttttaattcttctgtccacgccttattgaccgctgagttgtccatgtcaggatgaaccgctaataccaatactttcacagctaccacacctttcccttttgactgtattttacctaatctttgccggttcagccaaataaaaagaaagcccccgagaaaaatggggctttcttttttaatttattccgggcttccttcagttgtttcaatatccttcgcaaaattcggattatctaaatttgcgttgaaaaagtccgccgtattcggaagcttgaggttcatattcattttttgagaaatggtcactttacaatctttaatgacatagtcaaatacgtgtccgccggaattgcgtccttcatcaatgaagtgcaggtgatatccggaaacagcgatgccgtttgcgtaccccggcgtccagaagccggcgattgtaccctgaatgtcgtcaaagttgaacacaggctgtgttttcaccgcttcgatcatcggaacgtacggtttctcctggcgttctaccgttcttgtctgcacctttttaaatacgccgtctaaacggatcgcataaaataagtttttactaggcagaaggctggcgatttcctgctcgaattcttcacgggtcatttcgccgtcgatcgtatgcgtcatatccggcgtgaaaaatgtgaatgagcagaatggtgacaggtctccgcctttaacaggcgtagccgttccgtcgccgcgcagacggtaaaattctccgtcaaatccgattaattcgccgtccagtttattgaacgtgccgattccgaaatcaccgaacttcggaatgtcagccatatcaaaatctccgtcatatactccgtccagcagagatgtcattgttgatacttgatagatctgatcctcaggtgagcctttttctccgcggctcatcatatggatgtcgcttgcgtttttcatattcccttcactccttttaaattgggctgttttagaaaacaggtcatggtgcgcagagtgctagagagcttttgctttcattttttctttgaattgcttcggaagcatgtcgcttgataaatggacattgtcactgtaatcgacaggaatgtcaatgatgacaggaccttctgtgttcaagcctttttgcagcacgtctgccagctgttccggtgactcaacgcgcaagccggtggcgccgaagctttctgcatattttacgatgtcaatgtttccgaaatctacgcatgacgtacggttatattttttcatttgctggaatgcgaccatatcatatgtgctgtcattccatacaaggtgaacgatcggcgcttttaagcggactgccgtttccaattccattgcagagaacaggaatcctccgtctcctgaaacggatacgactttttcacccggattcaccaatgtggcggcaatcgcccaaggaagcgctacgcccaatgtctgcatgccgttgctgatcaacagtttcagcggctcataagcgcggaagtagcgggacatccagatcgcgtgcgaaccgatatcgcaagtgacggttacgtcgtcatcaattgcattgcgcagttcttggacgatttgcagaggatgcactctgtcggatttatggtcgcttggcgccttctcgctgtctgtgagcatctgttttaattcgctcagcacttcttgttcacggctgcccatatcaaatgtcacagcgtcgtgttcaatttgtttaaccgtagcggcgatatcgcctaataattctaattccggctgataggcatgatcgatatcggcctggatttcgtcaagatggataatagcacggtcaccgtttacgttccagaacttcggatcgtattcaatcggatcataaccgatcgttaatacgacatccgcctgttcaagcagaagatcgcccggctggttgcggaacagtccgatccggccgaaatattggtcttccagctctctggacaatgtgccggccccttggtacgtttctacgaaaggcagttttgttttggcaagcagtttgcggatttgttttaccgcctccggtcttccgcctttcatgccgactaacagaacgggaagtttcgccgtctggattttcgcgatagccgcgctgaccgcttcttccggtgcagggccttgtttcggcgccggcacgctgcgtacgtttttcacatttgtgatttcattcacaacatcctgcggaaagctcacgaaagccgcgcctgcctgacctgctgacgctgccctgaaggcgtttgttaccgcttctggtatattccctgtttcctgtacttctacactgtattttgtaatcggctgaaatagcgccgcattgtccaatgattggtgtgtccgttttaaccggtctgcgcgaattacgttacccgccagcgccactaccggatcaccttctgtattagccgttaacaagccggtcgccaagttggatgcccccgggcctgaagtaacgagacaaacgcctggttttccagtcagtcttccgacagccgcagccataaatgcagcgttctgttcgtgacggcataaaaccagttcaggtcctttatcttttaacgcatcaaatactgcatcaatttttgcacccggaatgccaaaaacatgtgtgacaccttgctccactaagcaatcaacaacaagctccgccccccgattttttccagaggtttttagttcatttgttgcttttgccaacaccctcactccttattatgcatattaaatataaaattttaagtaatttgtgatattattcactatacactctttggaaattgacctccaatatcaattcgccgtatgattaatatgtttcacgaataattaacaaagagaaaggaatggataaggatggagcttcgccatcttcaatactttattgccgttgccgaagaacttcatttcggcaaagctgcgcttcggttaaatatgacacagccgcctctcagccagcagatcaaacagcttgagaaggaagtcggcgtgaccttattaaagcgcacgaaacgggttgtagagctttcagctgccggagaaagttttttaaaacacagcagaaacgcgatcgaagaaatagacaaagcgattgaaatggcgcagagaacggcgcggggagagctcggccgccttgtcgtcggttttgtcggctcggccacatatgaatttctgccgccgatcattcgggaattccgcgaaaaattcccctccgtcaagcttgatctgcgtgaaatttcttctttcagacagcaggaagaacttctgaaggggaacattgatatcggcatccttcatccgcctttacagcattccgcgttacatatggaaaaggtgcagagcagtccgtgcattctggctttgccgaagcagcacccgcttaccgctaaacagacaatcgacattcaggatttaaaaaatgaaccgattatcacactgtcgaaagaaacatggccgactttatacctagagtttgtaaactactgcgagcaggcgggcttcaaaccgaaaatcgttcaggaagcgacggagtatcaaatggtgatcggattggttagtgccggcatcggtgtaaccttcgtgccttcttctgctaaaaagctgtttaatctcgaagtcgcctaccgcggcattaatcaggtgcagctcacggccgaatgggtcattgcctaccgcaaggataatcaaaatccgatcctgaaacattttctggatattatgaataaacgccaggctttattgcaggcggataaggaaaatgcataaaaaagagggccgccgaaagcagcctcttttttttgtgcttttatggatttttactaaattggtagaaacgctcagtacaccttacgacctgtacccgtatacatacagtacaactgatcaggagggataaaaataacggggcggcaatgacccatctaaaaggaggcagaacacattacacatattaccgtcattttgaccctgatttctttctttgtgaccattatttttatattttggagacccgggggattaaatgaagccgttccggcgtcgctgggcgccattctcgttttgttatgcggaaccgtttcctttcatgatttgggggatatagggtcaaaagtcaccggagcctcaataaccattatctccacaatgattatggcgatcgcgctggaaagcttcggtttttttaactgggcggcggccaaactgcttcaccgcgccaagggatcgggcatccggcttttttggctgaccaacctgctctgtttttcaatgacgctctttctgaataatgacggcagcgtcttaatcaccactcctattttactattggtcttacaatatctcggacttaaaagacatcagaaaacaccgtatttaataagcggcgtattaattgcgacggcggcaagcaccccgatcggcgtcagtaatatcgtcaatttaatttctctcaaaatgataggcatggacctttatttgtacaccaatatgatgtttatccccggcacgctgggactggtgtttatggcctttctgctgtttgccgttttttaccgccgtttgccgaaacagctccccgatattccggttcattttgactcgctggaacacaaacgatatcatccgcttcagcctccgccagacccgacccaaaacagccgtacgaacatcatgttttgtgttttggcatttgtattgttcgtccggatcagtctgtttgcagcttcttacaacggcatatccgtttcgctcgtggctgtcatcagttcagtcatcctgcttggctggagatggttttatttaaaaatcggaccggcagatttattaaggaaagcgccttggcatatctttatttttgccttcacgatgtacattatcatctacggactgcataatatcggactgacggcgctgcttgttcagtctattgagccttatgtctcacaaagcattgcccacgctgcatctattatgggcattgctacatccgtcctctctaatttgttcaataaccatcccgccttaatgatcagcactttgacattaactgaaatgtccatcgacccattaaccgtaaaaatcatttatctggctaatattatcggcagtgatatcggatcattgcttctgccgatcgggacattagccacgctgatctggatgcatatcatcagacagcacggcgaaaaagtttcttggtcagaatatatcaaaacgaccattatcgttgtccctctcactgtcgtgtttaccattaccgttttatatgtttggatcagttggatttacctttagctcccatgaaaaaaaactgcctgctgtataagagaggcagttttatcatttatggcaggtgcatggtttttaaatgattcaatttccaaaaaacagtatcgccgtctgcattggtcagttcaagaatattatctgagacatcctgcaacagccccactttattcggtatatctcctaaatccagaataatcagcttcccgatatatctttttaattgttcctcaaaattccggacaaggggcacattagcgggaacaaccggcagttctgaactgtttaatgtatacggcgtctgctcatcggaatagggtgtcagccatttcaaatgatgcatcgagatgaaaagagtcttataaaccggagagaagaaaacaaaataatcatttaaaacacttgtcacatacccatgaatggaacggtctcccgtaacaaatatttctgtgaatctgccttttatatgctggagggtattccggtaagaaaaggaatgttcctgtttttcgggatgcggacttttttttcttgcgtacggttctttattctcttcgtccgggagcgtcaatgtcattcgctgaaggtgcagcagcggaatataaagaaacgtccggccgtcatgaatcacaatgatatcctgaccgatatccaaaagagttcctggaaatgtcgtattccccgatatctcaatatcgacttgtttatccagaaatctgcttaatccagccatttcattcccccctctcccgcgtttacggacaatctttccaatcatttacggccgcgtttccaccgataatctattgtccttaatacagtggcgtagctataagagacctctttctcccgttttgaggatcgaacggatcttgatgatcttttcgactttttggaggaagtacgctgctcttcgcgtgattcttcttcatgcggcttttcttcttcggcgctctctttctcacctttattctcgtcgtctttattctcctcttttttagctgctccttttgccccttcgctgatgctcttgatatgaaaaggataaatccgcagcacttctttatctttcacaagagtgtagtggccgtcggaattatccacaagtattccttcaactgcttcaggacctccgcggttgatggatacccatttgtggatcaggcgtttaaatatgccgtgaaaatcatcagccatttcaaattccgggcgctcctcctcttggccgtcctcttcttgttccgcgctgatgcttttgacatggtcggcgttaaaatatacaattccgtcatcttccgtttccagcacgagaaaatcatcccctgtttcgtgaagctttcctcttttcgattcgggacctccctgattcaattgcaccgtgcgattggtcatccggctgatcaggtcttgaaaatcatcagctttttcacattctgccgcttcggccggcgatacggtttcactcgtattttccgtcacacttttcacgtgtttccattgataataaacgattttattatcaacctgaagagcgatataatccgattgaatgtctgctaatctccctgtcttggactccgggcctccccggtagacagtaatcacttttccttccatcgcatgcaaaaagttgtcatcagaccgctgccgcttcgtattgcgtttcatctattgtcctcctagtcatttttctcataatgtaaaaagcataatgcatatatacgtatcacgattattttcgggaactgattcaccagcctatttgtaaaaaatctttcttcatttccaaatcagatattccaccgctctaactcactgctgatgaaggctgaccgctccttaatgtattcgcaaatcacttcaggctcccggtcaaagcaatccatctcttctttcttatatggatccttcgcgacatgcggcctgatctgctcatacagtgacatgaccttcggcttcatatgttcaatggtaaaccgggtctgaagcgtctcttccaaaagccttttgtacgctttgcggaaatacggttcatccagaagccttgcagtcaaggtattaaacccttgtattctgacataatcggcctccatccgatcaccatgaatgtctcttccccacgtcgcatcgtaatcccacggaatgacttcaaaaagtcccgtttcatgattccggtacaaagcataattatggacaaatccatcgtagtttgaggtaaacacgatgcccgcaagccaccgcaaatacttatcggcgtccaagtgtttgacgatctcccccttgaactctgacttcggcacggtattaattttatagatcatatcctgcaagtataaatcgtcttctttcgttcccgttttcttttcataaccaagttcgagcgatgttttcgtatcccgctccagatcactgacgagggagaaattggcgtcgtcatcaaccgcgtaaaaaacagcgccgtccgccaaattccgtttcgccagaaaatattcatccactgactccagctcaagatacaccccctcatgtctgccattgatttgcagggttacgaaattcgcctttggtgacagcgtcccaagctccgcgaagaaatcgagagacagcttattccgcatcatcgacggatctttgtattcagcgtttaaatgtatctctttcgccctgcgaaatgttttcggcgaataaaaagcgatatgatacgattttttcttaaaatctcttatatgcgagccgcggtacgccagatcaatgtcaagccgtttttgattcactctcagcaccgcgggcaccggatcatcatcccaaatgtcttttttcagctccattaagtctttcgggtgaataaacagctggtatagaggcaatgttgattggtctttcatcagtaaacctccctgtattaatttaggctgtgctttttatataaaactcagcgaatcacacatacacttttttcattcatgcgtactatgtggtagtaaggatcgcatccttaaaacatatatcatgaggaggtttcaaaatgggccactattcccattctgatatcgaagaagcagtaaagtccgcaagcaccgagggattggaagattatttgtaccaagaaccaaaaagcagtaagaagagaaaatctcgcaagcataaaaaatcccgttctcacaaaaaatctcgcagccataaaaaatcgtgccgctctcacaaaaaatctcgcagccataaaaaatcgtgccgctctcacaaaaaatctcgcagccataaaaaatcccgttctcacaaaaaatctcgcagccataaaaartcccgttctcacaaaaaatctcgcagccataaaaagtcccgttctcacaaaaaatctcgcagccataaaaaatcgcgccgctctcacaaaaaatctcgcagccgtaaaaaatcatgccggtctcacaaaaaatctcgcagccacaagaaatcatgccgccgcaagaaaaaacgcacgcagaaaaaaccttatcgtcctcagaaaaaagacccttgcaaaaaagacgattactgcagcaaaacagagtactggaaagacgggaacatctgggttgtaaagaaaaactacaagtaacaccattcgtaaataggctgccggctaaacggaagcctttttcctcaatcagatatatgccacgtgataagatatgcagccggttttcttttgttgtgtttccgaattttctttctgtataatcaggtcatacgataaagaaaggcggccgaaatcatgcatatcttacgagcagacgaactgaacgcaaaagacacttacaaattgctttcgggcacagtcgttccccggccgatcgcatttgtcactacgcggtcatccatcaacggcgccgtaaacgcggcgcccttcagtttctataacgttgtctccgcagaaccgccgcttctggccatctcagtcagccgcgcggacggtcggcagaaagacaccgcgagaaacgcactcgctcatcgggaattcgtggtgcacgtcagtgatcagtccattattgaagacattaacaaaacggcggcaaggcttgatcctgatgtcagtgaacttggcatgacagacctttctgtgacagacagcgcttgcatcagcgttcccggtataaaagaagcaaaagtgaggtttgaatgtatactcgaacgccatcttccgttccaaaatgacagcggagaaacgacgacagacctcatcatcggcagagtcgtttgttttcatttgaatgaccaagtatatgacgccgataaaggctacatacggacagatgagctgaagcctgcggcaaggctcgcggggaatgaatacgccagactcgggaagacatatacgcttgtccgcccgacctgaagcaggaaccattataatagaagaaactagtcaaaaagacccctttcgaaaggggtctttttgagtcttttaccatataactcagcctaatgtcttatagaatgccgaaacttacaaggccatcacccgtatgaaacgagtgacacatttttaggaggcagatgatggatttcattcagttactgattttttcagccgtatttattttgctcagccttatgtttcaagtatttgccgtcaaagttctcaatatcgattaatcgaattcacactgcttattacgggcatcgcagcggtgacttttttcaatgaaatgtacgtatttgcgggagttgtttctattttgctgcagcggcataatggaatggcggcaccggcgggaggaaaagcaatatgtgtacgattcgttttacgcgggtctttctgccgcgcttggcgtgcttatttttttcatcagtcagcctagctctatactcctgcggccgctccgtcgccgcgcgggtcggccccgcctttgagaaagcctacttcatcaatggcgatcgctgccgcatggcccataagcccgtcaaaatcaccaacggtctcgacgcggtggccgctctgccttagagcttctctcgtctcagggctgattctgctttcaaccctcagcccttcatactcctctccccatgtccgtccccagacccagcgcggctcattgatcgcctgctgggggtccattttgtaatcaatgatgcgcgtaatcatcgctgtctgagtttgcggctggccttctcctccctgggttccgtacaggatgtgaggctttccttctttacaggccatcgccggcatgagggtgtggaacgtccgcttgcagggttcaagtgtattgacatgggattcgtccagcgaaaaaaatgacccgcggttttgcagcagaatgcccgtctccccggctgtaacggcagatccgaactcgaaatagaggctctgaataaaggaaacggcatttccttccgcatcggcgacggcggcataagctgtgtcgcttccgaccggccggcttaccgccggcgcagccacgttaccgatttcttccgcaagctgctttgcataccgtttatcaagcagccgatccagcggaatatgagaaaatgccggatcagtcagcacttcattccggtgctgaaaactcttcttcagcgcctcgatcagcagatgataatagtcaaaggaaccgtgttcgatctgagaaaaatcatagttttccaatatattgagcgtcattaagcctgtaaaaccctgtgaattcggcggagcctgatagattttgcacccgcggtaatcggaggataccgggttcgtccactcgccgcggtgggctttaaagtcatcaagtgtcagacggctgccgttgttttgcaaaaaggatgtgatgcgttgagcgaggtctccttcataaaaagcgcttctgcctttctcggcaagctgctccaagctggccgccagatccttttggacaaaccgttcaccgggcatgggcgcttttttgtttctcgtataaatggccgaggtgtaaggcgtcgaggctaaaagagcgagattgcgttctgtgtgggcgcattggtcggcagagaccggaaatccgtttgccgcataatcaagagctggcttcagcacctcagcgagcgaaagacgcccgtacgccgaaagcacggcatcccagctgtccgccattcccggaacggtaatggcgctttctgtcccgcgcagagggatcgcttctctgccccgatacaagtctctcgtcacatgcttccctgaacggccgctcccgttataagctttgattcgtcccgtttctttatggtaagtgagccaaaatgaatccccgccaaggcccgtcatatgcggatacacgactgccagacaggcgctgaccgccactgccgcgtcaaacgcgtttccgcccttttccagaatgccggcccccgcctgagaagcgagataatgcggactgacgaccatttgtttcgttccgatggttgaagtattcatggcaagcccctttacaaattttctcaattataaaaatcggcttcgcggccatccacattcctgaaagaaaatctcacacactatttacttttcgataagaaataattctaagtcattacgtatcgaaaacaataaaaaatttctgccttcataccgtaatgtttcatgatacaataatgtctaccaaatgaaggaaggtgaagcgggttggaacatgaatacagcattccgaatcttgtccttgatgaaacggataaacagattctttcgattttgcacgaggaagggaggatttcctatacagacgtaggaaagcgggttaacctgtcgcgagtggcggttcagcaccgcattcagcatttactggatgccggtgtgattgaaaaattcaccgctgtcattaacccggcgaaaataggccgccatgtgtccgtgttttttaatgtggaggtggagccgcagtatttggaggaaaccgcattaaagcttgaaaaggaaccggcagtgacaagcctttatcatatgaccggaccgagcaagctgcatatgcacggtattttcgcaaatgatcaggagatggaagagtttttgacaaaacggctctatacgcaaaaaggcgtcgtcagcgtcgactgccaaatgctgattaaacggtataaaagcagaacgggcatgaagctgtaaggaggacatagccatgaaacatccctattgggacattacggcggcgatgatccgaacgggcattttcggattcgggggcggcccgtcggtgatcccgctcatccgccatgaagccgtcaataaatacaaatggatagatgatgatgaattcggagaaatattagcgatcgcaaatgcgcttcccggaccgattgccacaaaaatggccgcgtatctgggctttaagctgaaaggcacgttaggcgcaatcgtggcaacccttgcccatattctgcctacatgccttgctatggcgggcttgtttgcggctgtcaatgtcttaagccactcagcaattgttgccggcatgattggcgccgtaacaccggtaatcgccgtcatgctcggcattatggcgtacgagtttggccaaaaagcgcttaaaggtttcggctgggtcaccggcattctgttttttatcatcgcttttatcggcctgcaaacgctgcagatcaatcccggctttgtcattattattttcttagcatacggcgcgtttcattttaaattgaaagacaaaatcacaaataaacgttcaaaagataaaggaatgtcggcctcatgatcatgatttatgtatttatggcgttttttgtcgcaaacgcactcggatatggaggcggaccggcgtcaatcccgctgatgtttgaagaagtcgtcaacagatacagctggctctcaaacgatcaattctcaaatatgctcgcgcttgcgaacgcattgccgggcccgatcgccaccaaaatcgcggcgtatgtcggctacagcgcaggcgggtggcccgggttcctgattgcgctgatcgccaccgtcgtaccgtcggcgctcgcattgatcgtcctcttgcgcatcattcagcgcttccgccaatcacccgtcatcaaaggcatgacgctgtccgtccagcctgtcatcgccgtcatgatgctcattcttacctggcaaatcggcgcagacggcatcaaagcgatcggctgggttcaagcgatagtgattgcggggatttccctccttgccttgacaaaattcaagatgcatccggccttcctgattatcgcggcgtttttgtatggaggtcttgtggttcctcatttatagaaaaaagcacctggacaggtgctttttgtttcagtcccgatatgttgttcgatatagataactgtttcttcgtctatgcttcttacatgtgattcctgtcatcctcccagatggcctgatcaataaaaaacatttgcagcctcccggactgcaagtgttacacgtgatttttccgataaaacgttcgcaaaacatgcgtttcaaggtcagccagacggacagggatcggcagcctgctgtctcgattgatcattttcattgtgatctgatagctgctctctaaatcaatgttatgtccgcaagacaagaagataggcttcacgtcccgccgtgtccgaagcgcccggccatatacctcgccgtcaatgagaatatcggtgcaggcgccgacttcattttcgggcatctcaaaatcgcatcctttgattttgagataggttttcgcaatcccaattgtaggcttacccagaaaaaaagccgcatgggtggcaacgcccatatgattgtaatgcagatacccgttgccatcaaacaaaaacacatccggctccgcctccagcttttcggccgcttcaatgatcagcggcagctcgcgaaacgcaagaaaaccggaaacatacggcacgctgattttccccatgctgtgtactttttcaatcacttcttttgtatcagcgtcaatcacgatgatactgcatacgccgtacggttccccgtcctgctcccaataagcgaggtcgacgcctgcgcaggtgttgacggagtctggatggatgacgggggataggttgattttatgtattagggattgttgtgtttgaataaaatccgattcatcatttagatcaaaatcgtgaatttgatgtattttcatttcattggttttcctcattttcatttctaaaatcgtcttttcagttcaagttcttcatttcgatatacaatgcaataaaacttccataaggataatctccatcccagccacatggaaaatagcccgctttataaattttgaaaagtttttcaaaaaaattgtctgttttcccgtttactgctctatttattgcacaattattcagatctgctacgatctcttcaagaaaagtattaaattcagtcgtagcacttctgacattttccgaaaaaattttcagaagcatgtctaggttttgtggtttttgatcatcgtttaatttataaaattttccccatacctcactcatctcgttttcttttatatctttccacgcatattcatcttcaccaattacatcttcgtaagcatagtacttagctttttcttcatcattaataattttagtaaaataagagatatcatgtgatgcaactgctttaaaggttttggaaaaatcaataacttcttttacctgattatgataatgtccgtatttcattactttatacacctttcctaagtacaaccgtagggttaccaactctccggtaaccggaacgcagcctaaagctaaataaatttttcagaatttacaaaacagaaaacaacaattcacctatgaaaaaaccttgaaaggcttcagcagccatcaagtttaattaatttttctaaccattccctcttataagtctaatcctcaattaaatcaagataatatttatcatttttcataagttctattaaaaactcttctaatgaatctgcaatttttatatcatcgtaatatattgaattgttttgttcattgcctaatgcaattaacgataaagcactttcatttgcttcaaaaaaaatcaatttatcttcttcaagttcctcataaacttctatatctggataaaactcaaagtcattaacttttaatcttgcatctctaattgaagcaggtccaagaatgcgattaatattatattctgattttttcagaaagccgtatccaacctcaagaagaaactgtctcaaatcataaggtaaccttaaacctaacttattttctacttctaagatttcattctcacttacttgataaaatgtattttctttgtaagttttaataaaatcatatttcacaattatttacctcctttaagtgggagagtttttctcctgtgacggggtcatagcccaacagacatttaagtcattttaaacagaaaataacaattcatttgtaaaaaaccttgaaaggcttcactagccaatcaaggtcaattaattcttctaactatcccatttttaagtctaatcctcaattaaatcaatataatattcgttatcattgaggaactttttaaaaaaatcctctaacgactcagctatttgagtgtcaaaataaaatattggattgttttctaattgtaaatctatagaaatataaacaccctcgtttacttcaaaaaaaataagtttattttcatcatcataaagttcatctaaatctgggtcaaactcaaaaattccttctcttagtctaatgtcggctactgcccctggccccaatatcctattaattgcattatcactttcacctttaataaaaccataaccgacttctaaatataattgttttaaatcatttggaatatctactttcattctttgttcagcttttaatatatcctcttcaggtaccttatatgttttattttctaaatgatttataaattcaaattcagccatgaactatttttacctccttggaaaaagttttcctgatggtgctccctttccatgtatacccgcttggtgttcatccggatattttgccggatgaatattccaccattcgtgagggccaccaaagttgttctctatgatatgatgggcatcgtacggttgaccaatacttcgagcaacttctccatgcttatcaaaaacctcttctgtatatctaggccacttttgattggttttttcttcccattctgcaatcaatctatctttcaaacttgatgtgaatttgctcctatgcttagctgtttcttttggtgttaatttctcatagttattatttcttaaagcttcttttatatggtcgatctgctctttacaaacctttcgtccagttttggcttctatatctctgagatatgctttcgctaagtctttatttagttcaccagtagctttagtgccttcactatgaacgtctgttttttgcctctcaactttcagcaccttaggctcttctacatgatctgctttcggttttttcgcaaattttccatcgcttgtgcgaaacactttcgacgaggcatcatagaataccttccctgtttgtgtaatatagtgaatatggtctttagcaacttgttttaggtaattaactggatactgtgcgactttcttgacagcttctttattaatcaaattctcggtatagtggctgcttttagcatatgcgtatgctggctgatttcggaatgttcccatcagctgtttcgcaaaacgtacggtttcaccagctgattctatcaccgataaagatcgttttttaactgattgataggtttgatgagctacttttttcacatgggtcggattcacgacatgtcgtatatctgatagtttcactttaactgtcgaacctttatccatatttcgatacattgatacactatgatcaaccgatttggccagactgcccgctccaaccaaactcagcgcagcttccagtgccccttgcttccgcttctcctcggacactttgtttccgaacatatctctgcctgtgacggcttctgtgaatccgtttgaggcgacaaggccgtatgcgcccatttctgtcattttgagaatgtctaaggattttccggttttataggcatctaaagcatgttctgcggcaatgacggtttttccggttttgtaaatggcttttccgcctttgaaagcgcggcccgcccagccgacgaccggtatgaatccggcggcggccatcgctcctgctgtgacgcgttctgcggtggagagcttttctccggtcaccggatcaacgccttcggctgctcttttataatcataatagccggtgacttcgccggtaaagttgcagatgccgtcccatgttttttcgtaccatggtttattggcttcttcttcagccttttcctgaagccgtcttgcttcggcctgctgggcttttgcgtcaatatagtccgttccctgtttttctgtcgccgtgacgcttttgtagatttcattgctgtggaaggcttttttgtcatagtacataggggatgcgcttttcccgttgctggtggcctgcatgagaacagaatatttgctgagcacggcgttgtccagagattctaagttttgatattcagcagtcagggattcatcaagcgtatcgactgccgtgattgtgtcacgtctggttttctgggcatcgcccattttatcagcgtaatcatccagcgtatatgtgtcgagatgaataatatcgctgatgcctgacaaaattgaatcgatttctgctttatgagcggagacaatctctgaagctttcaaatccgcgttgggcagctcatgctccaaaaatgaagtctccacatatgtatcgctgagttcttgatctttaatgtcacctgaaatgccatttaaaaacgcaatttgagcagagacaagcgtcagccagctgtcggcgatttccgcttgtccctgaaaaaaatcttttatattgtctgcgcctttccctttcaaagcatcacctagatcggccacgccttgaaaggcttgtttgagcgcacgcagctgctcttcaagggcttcgtattgtttctttctcttatctgcttcgtccgttaacgattgtgattcaaacactttgctcatcggcaagtcctttctttcgttattttacggcgatcgcctcgtcctgttctttcaaagaatctacgttgtctttaacgtccgcgatattcttatgaacggcctgcttgtattcgctgatcatcgatacaagctttgcctcgcgggattggtacttggaggtatagtcgagcttgttttttccgtttgaaccggcgttcccgatcgaaacagcctccaaagcgctgctgacggattcaagctgcttcatgacggttccgtatttgagttttatttctgccattaaaaccaactccagcttcttttgattgattgtattttttctccgaccgtgtcaagggcttcttctcccagcgtcagcaggtgctctgcctctctcgcgatgcttctggcggcaaggagccctcctttttcaatttcaagctgtgtcatctttaagccgattcggtaaatataaccgtcgtatttgtctgtgacgattctgtatgcttctgtatgggcctgatcgcgccggtcatcaaattcttcagcaaaagtgccggtccaatgatggtccaggtgcggcctgaggatgtccctgatttcagatacgccctcttcctgcagagattctatctctcttttcgcttcttttaatttatcaatttggtgttcaacctcgcccagtttatggctgatcgtgctgttaatatggcttaatgtgcttgaatggctcatctgttttcacctcgtcttacgcaaaaagtcgtacaaaaagcacagacttttccatactatatttccatatattatattttaaaatagacagaaagcagcttaaataggttaaatggcttattttcaacagccgagatgctcatcattaacgccaaaagactcacataaacggcatatccattcatcgatctcctctatgtatccatgataaattccctaaaaaaaaggagacagtgattaaccgtctcctttgccttgtatcatgatcatcataccgtcgttaactgcagtcccagttgtacaaaacgtttgagaaatcttttctcttcaaatcttccggtctgataaagaaattggcgattcccacatctccccacatcgaatcaatgtcatcatctgaatcaatttgcaaaagcagaattgtatggttttgatgggagtaagaccgcggatcttcctgggtgaaggacgcatagccgccgattttatggccgaatgcgttcgccgtatattcgtcatacacctcatcgtcaaactgctcgaaatagtcaaaggcatccatcccggcatactgcctgaattgaaaatcagacgggagcacccattcagcagacagctcaggggtgatcagcgcttcggattgaatcggaaaatcgtactcctcttcaacctgaacgaaagaaaaatcatccatgagctccgcttcttctgctgtcacatgttcaaaatatttgacgcagaaacccgtttgcgcgcacccgtcgtcaaaattcagaccgtatacgtcatcactgaccgatatgtaaaactgaagaatgccggtgtccggaaaatcaggaagtccgggcatatccgcaaaattgatttgggcgagaagcttcatcggcctgccgctttcatctttaggatatggttcatgtttcggaaaataggggtctcctgcaattttactgtcataccgccccgtttcagcttttttgacgtgcagtttgataaaaggccgtgctgacgtttccagcagaccgcgggatgattccatttgcttcggcaatttccatgttttttccacgataaatatctccttcgtctctaaagattgtatgataaaaggccggcgcggtccgccggcctttcaagtgacagaatcagtctgaggcacgacggctcttcttccgattgagatatattccacgcccgcctgttccgcttcctcaagcgagtggcagtttctcccgtcgaaaataaccggggtttccatcagctctttgtacgcttcaagcgggaagtgtttaatttgttcccaatctgtcagaatcaggacggcatccgctcccctgacggcttcttctatggactcccgataggaaacttcagccggaagcagtccggaagcccggaatgaagcgatcggatcgtacgctgtcatccgggcgtcaagagccgccagacgatctgcaatgacaatggacggcgcgtcccgcatatcatctgtattcggcttaaaagacagccctaataacgcgatggtcttccccgtcacaccgccgagcctgttcagcactttatcaaccagcatggactgctggttattgttgactttaatgacggacttcagcaattcaaaatcatgctccacatgtcccgcgatctgcacgagggcgtttgtatccttcggaaaacaggaaccgccgtaaccgatgccggctcttaagaattgattgccgatccgtttatccaatcccattccgtgtgcgactgattccacatccgcaccgactttttcacatatatgagaaatttcattaataaaactgattttcgccgctaaaaatgcgtttgacgcatatttgatcatctcagcgcttctgatgtccgtatgatataccggaatcgcaagcggcccgaaaacccggtcaagcgtttcccgcgtctgccggtcttcagccccgatcacgatgcggtctccgtgaaaggtatcgtgaattgccgaaccttcacggagaaattccggattcgaggcgattgaaatattcacgtccgctttcagccgtgaatgaataacttcgctgatcctgtcattcgttcccacgggaaccgtgctttttgtcacgacgatcgcatctttacaaatatgttcggcaatccgttcggcgacattttcaatataagtaaggtttgcgtgcccgtcttctttttgcggcgttccgaccgctataaaaataacgtccgctcccgcaagccctttttcgtagctcgtttcaaatgccagccgatgccggccgatatttcgtttcatcatatcttcaaggcccggttcaaagataggggacaatccctttctcatctgctcaaccttacgttcatcaatatctatgcatgttacgtcatggccgatttctgaaagagacactcctgtcacaagaccgacgtagcctgttccgatcactgttattttcatcgtgttcccccaaccgtttagaaattgctgctgggcagcttaccgttattatcatatgatcccggcgccggctgaatgccggaagcctgaggtcatgataggaaaaaacggcgccggccgctgataatagcataagcataaaagaatcatcttgcaaaacagccgcttacgcttcatttaaacgggatggagacgacgattaaaaaagaccccagcgcttacggcgggccacaggcagcggaggttccttataaacggctttgttttcagcgagaagcgccgcattttccgcgagcatgtaaatcagctcagcccctgcttcttttttcagaacgccgagcgcctcctgataataaaaatttctcggtccgagattatgggcgtcagatgcgagaaagtggatcaaattcgcttcaatcagctgcagcgaaaaggatttcgctttccgaccgaatgctccggcaatgcagccggccgtcacttgggcggccgcccctttcttcacaagactgtaaaggacggaagggttttcgcgaatttccctgttccgctccggatgggcgatgacggggacatatccgttcagctgcagttcataaaacagcctttcagcgtaggccgggacatgatccgccggaaattccgccagcacatactttgtattatggagcgggacaagcgtgccgctttgaagacctgccagcagatctccgtctgttctgatttcctggccgggcagaacagtcagcggaatgccttccttgttcaaacgtttgtttaacaggctgaccgcttcgttgaccgtatgccggtccgtgtcatagcggtatttcacatgatgcggcgtcgcgatgatcgtatcaatcccctgtctgaccgcttctctcgccatcttcaggctttctgtatcatccgccgcgccgtcgtctatggaaggaaggatgtgacaatggatatctatcatatttcaatccctccttaaaaagaatggaccgcgcccattatgacattattgtccgtaataggcgtagtccgagtgtttcgtttgtttcttcccgttcatcacggccccaaggagcttgcacgggcagtaatcgagcgcttcttttgccttggccgctttttccttgtccgttttcccgcttgagatcaccataatggccccgtcagtgtagctgcctaatattttcgtatcggctacggccaagacgggaggcgtatccaaaatcaccttatcataaactgcggctgcttctgacagaagatctttcatggcacccgtcgataaaagctccgccggattgggcgggatcggcccgctcgttaaaatatccaggtttgcttcatcagccggcaggacggctttctgaaacggcatctgttttaacagcagtgacgttaatccggttccgttatccaatttgaaggtgaaatgaaccgtcggtttgcgcagatccgcatcaattaaaagcacttttttcccctgctgtgcaaatacgacggcaaggttggccgcggttgtcgattttccttcttccggaccggcggatgtgatcaaaagggacttcacctccgtatcaacggaagaaaattcaatgtttgtgcggatcgtgcgatattgttctgagttgatggatttcggctcagacatcgcaatcacgcttcgttttccgggtttgtcttttttacgcgtcaacatgtccgcccccccgcttgtttggtttccgccatcctcaagtttttggcaacgctgtctttagtactgattgaagtaaccgttcccaggatcgggatgccgagcagcgattccagctgttcttccgatttgatcgtattatccagatgttccagcaaaaaggcgagaccgattccgcccaaaagtccggcggcaaacgcaatcgcgatgttcagcttacggttaggctctgccggtgactggctgtccgccgcttcggcctttgaaaggatgctgacattatccacgttcataatggcggtgatcttgtcctgaaaaacggctgcaaccgcatttgccataacggccgcccgcttagcatccgtatccctcacggcaatcgtcacgacttgtgaatcctgctcgctggacaccgtgattttcgattccagctctttcgaagtcatggacagatgcagctgtttaatcacctcatcgaggatgaccggacttttgatgatgacattatacgtgttgattaattggaggttggtttgaacatcattgaattggacttctttttgattgtttttggattggctgaccaaaatttgagttgagttttcatagaccggcgtaagagcgaagaaactgatgagtccgcctgcggcagatgccgccgcggtaataataagtataaacagcagacgctttctcagtattgcgaatatttcctttatgcttgtagattctcccatataacctccatatcactttccgcgtattcccattccctccaatgatcttttccaattacgattatacagttttaaactgtcatttctaaccttttcaaatgacaaaattcgacaaaaatagacaatcacttcaatctgttttatttttgtaagcgctttaaatactggtgtcacaggaagattaaaaaatcccgcggccaagagcctgcgggattttatgttgcatatccatttttaatataagaaatcaaattctcaagcatttcttttgtggtcatctcagaggactgctcaccaatgtcgtgcgcatgcattaaaatcttcagaaactcctcttgatctaacttcgttttcttcatcattcgtttcctttcggcttccattaaattgaaaacaagattattatatgctgtcgggtgctgttttgcaatctctaatacatcattcgacactttcgggtttttatgtccttttttaggaaaaactttttccgggccatgtgttgcgatataatagaggaattggaatctttttattttgtgactcgttaggagcgataatcatgcttcaggatatgattgctaaagaagatgtgctcgcagcggctgaacagcttaaagaacttcttccttacaatgaagacaatgttcagctgatgaagaaagcactcattttatatcggcaggattccgtctatcgtatacaggttcaaaccccgacagagatttccgcatatgtgcaggatgttgtgcctgtaagggtcacgctgaacttatttttcatggtgaaaagcggctgcgcatgcccgtctgaggcgatctgccgccacgtgctggccgtttttctttacgtatatgcccaattcgagcgggtcggtacctttaccgaacattggctggaaagagaaaagcttgaggaaagcagggagcttgtccgccggcagtttcaggaaaaagtgctgccgaatgaagagtcgctgtcaagctggctcgctttttttgattcggaattctcgctgtgggaggcgcggacgccggccggaagccagacgatgcagggcctttattacggctatctgtcagcgctcaaaaaacacgctccgaaaaaacccgagcttaaaagcttatatcagattcattcggcgcttgccgtctggcttcacatgttcactttgattgagtcaggcagattggatgccgaaaaagattattacagcatcaatccatacgtggaacagctgatggatacgatttattcctccattgacagactgaaaacgtacgctttgtctttttcactcgatccctttttagaccggacgcccccggtgctccgcagactgcttgtgaaagaagagctttttcaatacgaacgcctccgggtattcggtgaaatgtggagcgcgcttttgaaccggccgaaatgggttgcgcgtgaacaggagattctcgaacaggaaagcgggcgccgtttttcgccggaagtgcggttcggacggcttcatctggcctttttgcaaaaaaatgatgaagcggtcttccaagatatgtcccgcttccctcctgaagcgctgccgtatacctttcaatggctcggtgaactcaccgcgaaaaaagactggaaacggctgaaagcatggtatggccggatcgaaccgcttgccgtgaactatacgaagcttgataagccgtttaaagaaatgcgcgacatcatcggagagctgtttgcgctattggcggattatgcgcggcactcacgggatgatcagctgtttgaacggtttgcttccggctgccttccctatacctttaccgaatacagccagtacctgtacgaaaaacggcggtacgcggagtgggtggagattcacagcctcgtcggtttttccgtctgggaaatcgaaaaggacatcctgaaggaaattgccgccagtgatccggaagcgctcatcccctcctatcaccgggcggcggccttttttatcgaccaaaaaaaccgcagcgcctataaagaggctgcgcgccatctgaaaaaactgcggacgctttataaaaaggcaaaaaaacagcaggtatgggagcggtatatcagccggctgagcgcaagttacaagaggctgcgcgcccttcaagaagaattgcagaaaggaaagttgattgatggcgagtcttaaggaaattttcattcatgtagaacaaatggaagattggacatttacgctgtcaagccatgatgagaaggagcagccgcttactctcagtcagatgaagactcatttgttccaatggcatgagtccaccttttacggaacgtttcttgaagacgtcagcttcatcggcaccccggccgttctgctcagcccgtggatgaccgtcgagctgctcggaaaaaactcgttcaattcattcagcaccgtgcagctgacaaaggaaacggaaccgttaatcgaagcggcttcgacgatattcgaatttattgccgacggcgattttcttccagactatgaggcttggcaaaatggcgtcctgcgcttcaaagaccgcgagcttttgctggaaggctttacggcagactggttctcagccgcggtccaggactacattcagtacaatgatgacctgctggaaaaatggcggcggatcgaaacccgctcaccggccgttcatacgtttaaaggctcctttttggatgaagatgattttctggagggaatcggctggcatgacgatctgacgccgtttaccgtcgggctccgattaaacgagcctgatttcgacggtgacgactggaaaatcgaaatgtttttacgtgagaaaaaaaccggctccatcaccttttttgacggactgaagggactgaaaaaagcgtggcaggcatacagcggaaaaatcgcgcgcgaacaggaccgcttccgcagaacggttccctggctttcgtttgattcaggaacgacgctgatttctgaagaagaggcttggatcttcttatcggaagcgagtgagacgcttgtcgatatgggtgtggagattcttctcccatcatggtggcagattgtccgggacagcaatatgatgctcaaggcgaaagtgtcatcctcgccgcggggcgagtccttcgtcggcatgaacgctctgcttgatttcaactggagattcgccacaaacggaattgagctgacagaggatgaattcaatgagcttgtcgcaaacaacagacgtctcgtcaacatccgcggccaatgggtgaaaattgatcctcaattcattaaacaaatgaaaaaactgatggaaaaagcggaatctgagggcctccacatgtccgacgtgctggcgcgcgaactgatggatcacggggaaaacggagccgaggacacggacatcattgactcatcggcatttgccgggatcaagatcgaattatcaaagcagctcagaagcctgatccgcaaactgacggatgcccgggatctgccggagcatgaagtcagcgccgcgtttcagggccagctccgcccttatcagatgtacggcatgaactggcttctgtttttacgggaaaacggcttcggcgcctgtctcgcagatgacatgggacttggaaagacgattcagatgatcgcttattttctccatgtgaaggaaagcggccggcaaaaagcgcctgccttaatcattgcgccgacatcggtgctcggcaactggcagcgtgagctccagaccttcgcgccgcagctgaaggccgtgcttcattacggcccccgccggccgaagggggaagcatttgtcccggcctatcaggacgcggatgtcgttcttacttcttacggcctgtcgcacgccgatcaggaagagctttcttccgtgacatggagcaccatctgccttgatgaagcgcaaaatattaaaaacgcgcatacgaagcagtcccgcgcgatcagaaagctgaaaggcgtccatcatatcgcgctgagcggaacaccgatggaaaaccgcctgacagagctttggtcgatctttgattttatgaacaaaggctatctcggcagtctgaccggctttcataaacgctatgtgctgccgattgaaaaagaccgtgacgaaaaaagaatcaaccagcttcagcagttaatccggccgtttttactgcgccggacaaaacgggatgaagaagtggcgcttaatcttcctgacaagctggaacaaaaagagtttatcccgctctcagccgaacaggcatccctttatgaacagcttgtcaaagatacatttgaacatatggcttctctgaccgggatgcagcggaaagcgctgattctgagcatgctcggccgcttgaagcaaatatgcgaccatcctgcgctctatttgaaggaagaacagacagagctgttaaacgggagatccgtcaaactggaaaagctgcttgatttaatggcggtgatccgcggacaaggggaaagctgcctcattttcacccaatacattcagatgggcaatatgatgaagcgcctcctggaaaaaacattcggagaaccggttcagtttttaaacggaagcctgtccaagcaggaacgcgattctctcgtcgaacggttccagaagaaagaatacccgacgctgattttgtcactgaaagcgggcggaaccggcctgaacctgacggctgccaatcatgtcattcactatgacagatggtggaatccggcggtggaaaaccaggcaaccgaccgagcctaccgaatcggccaggaacggttcgtccacgttcacaaactcattacgacgggaacgattgaagaaaaaattgatgccatgctcgaaacgaaacaaacgctgaacgatcagattatccaaagtgaaaattggattaccgagctgtcatccgctgagcttgaagaattattcaccctcagcgcatcggcgcaatcacattaaacgcaaaaaggccggctctctcagaagagccggtcttttatgtcgtccttactgttacgccgcatttgccatgaatgcgtcacgccagtcatgaacagtatcgccatacctttcacagtaaattcctgatcatatgcgcaacgccgttttgatcatttgtcaatgtaacggcatcagcgatctctttaatatcttctctcgcattccccatcgctatgccttttccggccgcctgaagcattgaatagtcatttaagctgtcaccgaccgcggcggtttcagccatcggaatgccgagcttttgcgccagccgtttgagcgcctgccctttagaggcgtttcgagacgccagttcgaagttgtggtcggcagagctgacaagggtgagatctttctgaccgctgaatcggtcccagcccgctttcagcttccgctcatcaaacgaaaatccgagaatattataaaaatccagatgctcttctttctcaaagagctcacggtatgaatgaatgtaagcaaagccggattggctgtattgcactgaagccgcctgttccaaaacggaaagatcggcttcaggattggcgcttttcacccggtccatttcgatatcgagcagctgcctgccggtttcaggcgtatagatggctttgtttgtaaacacctcatagtaatattgattctcttcaagccatgacaaaatcccgcgggctcttgtttcttcaatcgcatcacagtggtacaggctgccgtcaggagcataaatggcggctccgtttgcgctgatgacccacgtttttatgccgagcggttcgaatatggagtgcacgtcaaaatgcgcgcgtcccgtggaaaccacgatttcaattcccgcttgccgggcttcccttaaagcccgctcattttcatcgcttacttgatgactgctgttcagcagtgtgccgtccagatctatggcaatcagtttcacatgtcctcatcctcttcttcagattcagttacaagcaattctacgccgtgccggtcgagcagatcgcaaaaatcctgatcaggcagccgatcggtaatcagcaggtcaacctcgtgcaggtctgcatactgataaaaactcgtacggccaagcttggagtgatcgctcagcgcaatcacctgttcagcctgtcggatcattttacgctttaccatgccgtcttcttcatgcggaatcgtcaggccgttttccgagatgccgacaacgccgatcagcaccttatcggcgtgataatcccccagtttttctacaacggaagccccgtataaaaaccggtgttccttctggagctttccgccgagcaggtgaatatcaattccctcttttgcggaaaggatatcggcctgattgatcgaatttgtaataacagtgcagccggtgacatttaaatgctccgcgcaggcctgcacggttgtcgaagtgtccaggatgatccggtctcctttatggatcagggatgcggccagcttgccgattttgtttttctcttcagaaacggttttcagccggcccgaatagcccggaacttcctgattcaccgacggcagaatcgcgccgccccgtgttctgataatggccccgcgctctttcagctttacaaggtcccttcttgcggtatctcttgaaatatgaagcagcgaacatatctgttcagcggtgatccgccgatgctgtttcaaatattccattatcgcaatcagtctttcttcttgatacacgtcctcattccctttttcgtcacttatctgtaagtaattataagtttttatcccaatatattcaatgtttttaagtattcataagcgaaatcacttctttttaaccattttttagctcccgcacaaaaaaaccagtctttcgactggcgagtgggaaggaggtattgcggggcccgctgaaaggcgggaaatcgaggaaaaaagcatgctattcagccagcggctctttccgtttttgatccataaaccgaacggtatcagccatgacctcggtcacataaacttttacgccgtctgtcttttcatagcttctcgtctggattctgccgcttacaccgaccattgaccctttttggcagtacaatgccgtgttttcagcgttttttctccagatggtacagttgacgaagtcggttccggtttcacccgacgcgcttttaaaattgcggtttaccgccaacgtaatatgtgcgacgggaatgcccgctgctgtaaaacggagctccgggtctttcgtcagccggccgacaagcataacgtggttaaacaagccgtatcctcctctctttttcgaggctggcttcattgtagtacaagggctcgtgaaagcaaaaagcggataaagccgttattcgttcaggctgctcttatgttttcgtttttctttctgataaaaaaaacttttgtttttggccgcttatgtaatatgtatttttgagcagccgcgagaaaagtttcgttttgagccagtctttctcaaacatgcggacaaactttccgccgtcccatgcgaaccagtaaaaactcagctttttatcagtcagtgaaagctgaattttatactgttccatgcggtcttttgtttcatataaaaagacgacatttccccttctgttaagatgcacctcacaatcttcctttttgcataccaagtaggaatgatcgtcttttcgccttgaaccgtcttctatatagatttccttcaggcgcaattgattcataagcatctctccatgaccatattcttttacattataatgaaaaaatagaaatgattaaatgttgaccgcctacaaaaatgatgaagcatgtcttacagcattttcccgggaaaaatgatatgtgttataataaatgaacgaaacatggacaacaggggtgaaaataagagatgaaaacctttaaactggttgatctgaatgtggaacgtttagataaagacgatcagccgattgagcagtttccccttttagacggattgattatcaacaaagaggacggagaaaatcactggttaattgaagcactggtcccggccgaacacttttctttttttgacatgctgatgaaaagccagaaagaagcgaaggtgtttgtaacgattacgaaaaaaagcaaccgccccgcccagctgacgggaagcatcaaaaatatcgtcgagctggaaagaagtatacaagttttaatttacggtcaaatggtgtcaagaaaccaccccggatcagaaagcattctggagtcgctcgtgaaagaaggctactcgggcagccggctgattgaagcgtttaaacaaaaattatgatcatgaaaaaggccggacgttaatcatccagcctttttttgtgccctagtcattgtgaggagcccgctgtttcagcagatctctgatttcagtcagcagttctgtctgctgatctgtttcctcggcttcttcagcctcttcttctgcttcttttttacgtctcagcttgcctattgtgcggatcacgataaaaatagaaaatgaaataatgaagaagttcacaatcgtttgaatgaagcttccgtacttgatatgagcatcgccgaatgtcacggccagccctgaaaagtcaagaccgccaagaagcagtccgacaagcggcatgatgatgtcttcaacgagcgacgtcacgattttgccgaaagcgccgccgatgacgacaccgatagccagatccatgatattgccccgcatcgcaaagcttttaaattctgaccacatcacattcacccctttctatacaaaatgggcttttttataagcccatttgtttgcttttattctccgagcgcaaaagttaattcagcttcacacacgagctcgccgtcaactttggcaacgcctttgccgcgtccgatcgtaccgcgcgcgcgggtaatatcaacctcaagctccagcttgtcacccggttttacctgctttttgaaacggcagttatcaatccccgcaaaaaatgcgagtctgccccggttttcttctttaatcagcatcgcaaccgctccgacctgcgccaaagcctctacgattaatacgcccggcataacagggtattcaggaaaatggccgttgaaaaaatcttcattcgccgtcacatttttatatcccgccgcccgttttccttcttcgacttccgtaattctgtctaccagaagaaacggatagcgatggggaataatttctttaatttgctgagtatcaagcattctcttgacatctccttcatcgacaatagtatgtatagaaggcatatgtggcaaccaatctgtacatttggaagtatattatgaatcaatttctttttcaaccgcgctgtaaactgtaaccagctggcaatgagcctcgtccattaatgtgttatgataaataaagacttttaccctatgcaaagaggttggaagatgattgctaagtttactgaaaaacgtacgctggtgatgctgaatgagtggtatgacgccatgggaaaacgccaattcgatctagcccgttcccttcacgaacaaatcaatcagcatctccccaaattacaaaagaatgcaaagctcaaactcagatatcagctgtttttcgcacggtttcagctgctgtttgagaaaaaagacggtctgaataagctgttctgcgagctgaagcggcgcaaagatgagatggatcatgaattaacttattatttctattttttcaaagggttattccatatggtgaatggcgctccgaaccgtgctgtctgccgctttaaagaagctgaacagtacctgccggccattcaggaccgtttcgaagccgctgaattttattataaaacagcgggtgcatattacatgatgaagtcgcctgcgctctccattcaatatgtcaataaagcgctggaaatctatcaagatgaagccggctacatcaaaaaaacgctcagctgccggctgcttctcgccgtgaattatatagacgaggcacgctatgacgacgcagaacagctcttcaatgaatccataaagataacggaccggatcaatgacaataacctgctgtgccacgcctattataattttggttttttaaagaccgcccagaaaaaagataaagaggccctccctttttacaaaaaggtattgggcaatcagcgtttcgagaaagagtctcccgtttcctaccttcattgtgtgtacgaagcggtcagagcactttttaaaaccggctctgccgccgaaggacaaaccgtgctgcagaaaggattatacatatctgaaaaagtgcagaacaagattatgaaattgaagctgaccgcgctcaacatactgtacaccgctcaggaggacccgtacgaccgattgcagaagcttgtgctggagttgcagaaaattgaagcgtgggtggatttggaagtgctgcttcaggatattactgattactacaaaaaaaagggcgattttgagaaagccgcattttttatcatgcgcggctgatcaaaacgccccttcttttatctcactgagttgattaagcccagcatttggtctcccaatgtaatcgtgcggctgttcagctgataggaacgctgagacacgattaagtcggtcatttcttttgacatatcgacatttgaaccttcaagcgcgccctgctccatgccgattgcctgccggtttgcgccggtaagctcttcaatcgctgaagcccccgcgccgtttacggaaaacagattatccccttccgcatgaagcgcctgcggattattgacattgacgatgccgagattaaacgtctgcgaacgggttcccgcctggtctgaagcagtcagcgttccggttttgctgattttcagctgagtcagcgaactgtcaatttgtatgggctgaccgttctcatcgagaatgggattgcctcccgctgtcatcagctgaagcagccggtcatttccgccggccggcttgagggaaagtgagccgtcccttgtatacacccgccgtccgtccgcttctgcctgaagatattgataaggtgatgtgaacgcgatatcaaggtcacggtcggtttttttgatgcttccctgccctgagtccagctgcggagtcatgaccgttccggcgccgagacgcagaccgggcggcgttttccgcatgttcggcgaattttcctttttgtcatctatatggtcatactgctgtctgatcagctcggaaaagcgggagtccctcgctttatagcctgtcgtatcactgtttgaaaggttgctgctgactgtatccatctgctgctgaagctgatgtaaggctgttgaagccgtcagcattgatctgagcatcataattgaatgtcccccattttgttacactttgccgatttcatttgcggctttatccatgcttttatcgtaagcctgaatgactttttgattggcttcaaatgatctgtatgcttccgtcatttctgtatacgtgctcgtcacgtccacgttcgaaagctccgagacgccttgctttaatgaatacgagacttggggattcgccgccgcgctcggcagttcagagccgtcggccgtgctgtataggtcattgccgtcccgtttcagattgcgcacgtcttcttccattctgatatcaatctgccccgccggccggccgtttgtcgtgaccgttccgttttctgatacggtgaatttttcattgtcgactgtaatcggctgtccgtttgttgataacacaaggtttccgtttatcgtaagctgattgttttcatttaatgagaaagtgctgctttttgaatagcggacgccgcctgcggtctgcacgggataaaacagctcggcgttttcattcgtttcggcattcttgggaacctgattctccatcagcgcgatatccgtcggctgatcggtcgttttcaggcttccctgcgtaaacaacggtttcagctcctgcatgtatacgcctgtgttgacggaaccgattttcgtttttttatcgccttctattcggctcagaagcatctcgggaaaggcgcggattgaaccttgatcctctttgtaccctgatgtattcgcgtttgcgatgttatttgacagcatttccgttcttctctgctgtgtaatcattgcggacgttgcggtatataatccttttaacaagtcttccacctctgaaatagcattatttccagttgcctcaccggaacatttgttctataatgaaaatcagcattttttcttattatcggatttacattcccgttcgtgaagggtttgacagaaaaaaaccccattctttttcagaatgaggttttatcatcagctcagtttgcgttttggaagcttgtccatgttatccagcatgacgccggttccgaccgcaacacaatccatcgggttctcagcaacaagaacaggcaccctcagctcttcggcaagaagctgatcaagcccgtttaacagcgctcccccgccggtaatgataacgccgcggtcgatgatgtcagcggacaattcaggcggtgttctttcaagaacctgcttggcggcctgcacaatgacggcaactgattcacgaagggcttcttctacttctttgctgtttactgtaatcgttctcggcagaccggaaaccatgtcacggccgcggatggtgatttcttcatgacgtgcgtctgggaaaaccgttgcgaccttcaccttaatatcttcagcggtacgttcaccgatcagcagcttatactcgcgtttgatataatttaagatttccatgtcaaacttgtccccagccatcttaatagaagaggaggtgacaatatcgcccatagaaataactgcgatatctgtcgtaccgcctccgatgtcaacaaccatgttaccgctcggctggaagatttccatacccgcgccgatagcggcaacttttggttcttcttcaaggtacacatgctttccgccgcttttttcagctgcttctttaatcgctttttgctcaacggatgtaatattcgtcgggcagcagatcagcatgcgcggttttgagaaaagtccttttacattcagcttattaatgaaatgtttcagcatggcttctgttacttcgaagtctgcgattacgccgtctttcagcggacggatcgcaacaatattcccaggtgtacgtccaaccattcgtctggcttcttcaccgacagccagcactttgccgctgtttttatcaagtgccacaacggaaggctcattcagaacaattccttttccttttacatggatcagtacatttgcagtaccgaggtcaattccaatatcccttgcaaacatctatttatatcctccttgatatctgtttcacagtaaaatatccacattgtgccctaattatatatattatcataatttatcaaaaaaaagctgctgaacgatataagttcttgacaaaattttgcggatattcgcgaaaccgcccgggaggagaaaaaagggcccggcagacgtcaggcgctacggctgctgaacgggctccccttcaagaatttcatccttcttgtactttagtttcgtcgcctctccccctcttaaatgtctgatggatttatgataatcgagtatttcttttacttcattcgccaagtcaggattgatttcaggcaggcgctctgtcagatctttgtgtacggtacttttggaaacaccaaactctttcgcaatgacacgaacggtttttttcgtctccacgatatacttgccaatcttgattgttcgctctttgatgtaatcgtgcacaccactcgacctccccagttggatgtgagaagtgtgaaatgagatccgtattctgtaacagattcactgatgatgcagcttcttcgttgtccgattatataagaaggttttagaaatatgcccacgatccctcacctcaaacactctctttgataggtttgtaacagtgtattagcaatgaattgggaatatgctaaaaactcaataaggacaaggggcgggtcataattttctgctttttgatcggggggtttacatccgcgcgatcctgctgtagaatgaaacagcacaattagttacttaggtaagttttttgaaaaggagaacggaaatgatccacgtcaacagacgcctcattcaccaaatcaatcaatgcgcccgcctgattacgaagaaagccaatgaacggctggaaccattcggcctgtactcctctcaatggtcaatcctatattgcttaaaaacgatcggaccgatgacccaaaaagaaatctggtcctatctgaacgtagaggcgccgaccgttaccagaacgatcaaacgccttgaagaaaacggctggattcagcgggaacagggagaagacaagcgggaaaagctcgtcgtcctgacgaaggaagctgaattgaaatacgacagcatcaatcaagagatgctgaagttcgaggaagacatgcttgcggatttccaagatggagataaggaagctttttctgagtttctgaatgtgtttttaacgaaatagaaaagaaagggaagtgctgtacttttgagtaaatctgactcgatctggaccaaagattttattatggtcgtactcgtgaatttatttgtctttgtgttcttttatacatttttggccgtgctgcctatctatatgattcaggagcttggcggcagtgaatcgcaaggagggcttttgatcagcctgttcctgttatctgctattatcacccgtcctttttcaggggcgattattgaacggttcggcaagaaaagaatgacgattgtatccttggcgctgttcgccctgtcttcttatctgtatttgccgctacacaatttctatctcctgctcggactgcgttttttccaaggcatctggttcagcattttaacgacggttacgggcgcaattgccgctgacattattcccgccaagcggcgcggcgaggggctcggttattttgcgatgtctatgaaccttgccatggcgatcggtccttttctcggactgagtcttgtgaaagtcatttcgttcccggttttctttacgatttttgccgtatttgtttctttaggcttgctgattgcttttatgattcgtgtgccggatcaaaacaacagcggaacgactgtcttccgtttttctttctccgacatgtttgaaaaaggcgcgcttaaaatcgcgattgtcgggttgtccatttctttctgttattcaagtgtgacttcatatttatccgtttatgccaagacgatccacctgttggatgtcagcggctatttcttcgtctgtttcgccgtgacgatgatggccgcccgtcctttcacaggaaagctgtttgacagagtggggccgggaatcgtcatctatccgtcgattatcgtgttctccgcggggctttgcatgctggcgatgacaaacagcgccctcatgcttctcttgtccggtgccgtaatcggtctcggatacggctctatcgtaccgtgcatgcagacgctggcgattcagaactcgcccggacaccgttcaggctttgcgacggctaccttcttcactttctttgacagcgggattgccggcggatcctatgtattcggcctctttgtcgcttcggccggattccattcgatttatctggcagcggggctgttcgtcctgattgctttgctcctgtatggctggagccagaaaaaaagaacgccgcttgaagcggacggaaacgtttcaatcgcagactgatatgacaaaaagccgggggcagcccccggctttttttattcggccgctctttcccgcacgattcgtcccgccgcttttacataaggaggatgaatatacataagcgccgtataaccgagacatgacaaaatgacacccgcaaaccaggagatatcatagatgccggcgaacgccgggacgtacatcccgattaaagaaataaacgcgccgagaaaagtcgcggcaaaggcccggtaattatagcctttgtaataagtgtactgtccggtttccgaataaaggtcttcaactgagagctgcctttttctgatgataaaataatcagccatcatcaccccggccaccggtccgagcatcccgccgatgagcccgagaaacgcataaacattcgtggcgctctccatcagcttccacggtattgtgaacagagccaaaacggcggccaaataccctcccctcctgaatgtaatatacttcggcaggacattcgccaagtcataggccggtgacacgatgtttgccgccacgttaaccgagacggcggcgatgcaaagtgtgatgaccgaaagagcgataacaaaaggattatcaaaccgggccaaaatctccaccacatcccaaatcggttctccgaatgctacttgtgatccggatgtcaccgtgatgcttgcaaacgcgaacagcgcaaacgttcccggcaggccgtaaaactggccgcgaatctgttctttttgcgacgcggcgaaccgggtgaagtcagggatattcagaatcagcgtcgcccatattccgataatgcccgtcactccggcggcaaacggccaaaacgcttcagaaaaggtgtggaactttcccggctgtgagtaaatcggtccgagcccgccggcaatatctatcgcccaccagaccatgccgccgaagacgagataaacaagcgggcccgcccacacttcaaattttttgattgattccatgccgtgccgcagtacaagcagatgaatgccccaaaagaaaatgaacgacagaaagcccggcaaatgaagcccgaatatattccaatctccgccgagactcccccagcccggccatatgttcaaaagcagaatgtgcaaagccgtgctcccggcaaatgtttgaattccgagccacatgatggctgtaaacgccctgagaagcgccggaatgttagcgccgtatattccgtaagaagccctgataatgaccggaaaaggcagtccgtatttcgttccggcatggccgttcaaggccaaagcggcgaacaaaatgagtgacgccgtcacgataatggcgagcacctgccacggagaaaggccgatcgcaatgagcccgcccacagtcgcgtaggtcgggatattatgaatacagcccatccagatggatgcaaaattcaccgctttccatgtccgttcgccgtcttctaaaggcagtaaatctttgttgcttagccgatcactcgttgtttttttcattttctccctcccgcatgtgcgttttccttacatcacatgtgaaaaaatataactgaaaattccgtaaataacattggtcgctgtcgacaataatcgttttgatttttgagcacattacacaaaaaaagagacggggagagcccgtctctttttttcgcgcctgttaagaggcttttttgaggagaaccgaaaaccggaacgccatcaaaaggcttacagcgccgacaacgataagaatcgtcccaagcatatgaaaatggccggcggtaatttcttttccgaaaagaatgcccaaaatgacagaagacaaaatcgagccgagataccggcaggtctgaaacaggccggacgttgttccgaccatgtcggcggggctcgttttcagcatggccgcctgaaacgtgacatttccgaagccgtagccgacacccagcacggacaggatcagcccttttcctatcatgggcgcctgaagaaagaaaaacgttaacagcaccgccccgatcgcagtcaggcaggttccggcaacaatcggctgaagaagccctttcttatctatccattttccggtcagaggcgacaccagaatactcatgcccgacataaacagcataatcaacccgcttgtctgaacggacaaatgcatttcatcctgaaaatagctcggaagcccgaaaaagatgcagtaaaagaatatattcagcaaaataaattgaatatacaccgacgatagtttccgatgcgttttaaacagcctgacatcaataaacggcttctctgttttcagctcgcgccagataaacagcccgacaaacaaaagcccgaatacgccttctgtatagtgaggcttcgtactgaaggacaataaaaacgacaggagaaggataatcgctccggcaaacaggagtatcccgatcgtatcaagctggcggagcacgcctttcaagccgccgatctcgcgtttttcatctttcggaaacatatacattccgagaaaaaagctgagaatgataaacggcagattgacgaaaaagattgccggccaccctccccaaacgatcagaaaaccgccgagagtcggaccgagcgccgtcatggctgatgcaaagattgacaggacggccagcgccgaagcctgcttctcctgtatattggaacggatcaatccgacgccggacggatatatcgcgctgcttccgatcgattgaaaaagacgcatgatcagcaaagtcataaaagtcggcgcaaacggcgcgccgaccgccgagacggcaacaagcagaagcccaatcaaaaacagcttcttcctgccgagcatatcaccgagcttcccggtaacaggctgcgccaccgcgctggccagataaaaggacgatatcagccaggacaccgttgtaaacgacaggtgaaattcatgctgaatactgtgaagcgcaagagaaatcatcgacgagttcaatgggttcagcatcgtccccgaagccacggccgtcaagaacaggacgcgtctttttttggagattgtcattttgtctgtgcgataaattcttccgtcgtccggcttctgccgattttcgggaagataaacttgagtgtcgcttcgtgctgttcatcgctgaatgtcgccatcgcgtcagttacgaaaacttgctgatacccgagctgaaaagcttctcgcgccgtgctttccaccccgatgtttgtcgcaatcccgcataacacaatcgtgtcgattccccgtcttctgagctgaaggtccaggtccgtgccgaaaaacgcgccccactgccgttttgttaccgtataatcgttttctttcactccgatgtcaggcacaaattcagcccagtccgccggcggagccgaatggcccgccgcctcttcatccgtcagcggcttcagcgcatccgctccgtcatgaaaatccacgttcacaaagctgataaatccgcctttttcccggaacacatcaattaattttttcgcgttcggcacaacggtaccgcttttatcaatcggcacaatgcctttttgtaaatcaataaggaccaaagccgttttttcaaattgcagatttaatgatgttgtcataatgattcctcctgatgcagttagtgtttctcaccccgtttattttactctttcccggacaggatttcttccgccgtgctccggcgctctttttatggatataaagtcgcacgacacccatttgaaaaagcagcattatgaacgcaaaaaaccatgtcagataaccttacacgaaaatgttttatcgttcttttttctctataataatgaattaatcacaattacattctgaatgatacggaggaatacaacatgcagatgggcgatacagtatttatgttcttttgcgctttactcgtgtggctgatgacccccgggctggctttgttttacggcggaatggtaaaaagcaaaaacgtgctcagcacggcgatgcatagtttttcttctctcgccatcgtatccgtcgtttgggttttgtacggatattcacttgcttttgcccccggcaatacatggcttggcgggattgaatgggcggggctgaagggggtcggctttgaacccggaagttacagtgatacgatcccgcattccttgttcatgatgttccaaatgacgtttgccgtactgacgactgccattatttccggagcatttgctgaacgcatgagattcagtgcttttcttgtattttcctttttgtgggcttccctcgtatatacgcccgttgcgcactgggtatggggcggcggctggatcggccaaatgggcgctcttgacttcgcaggcggaaacgtcgtccacatttcttccggagtcgccgggcttgtgctggcgattgtgctcgggaaacgcaaggacggcacggctgcttcgcctcacaacttaatttacacgttcttgggcggagcgctcatctggttcggatggttcggcttcaatgtcggaagcgccctcacgcttgacagtatcgcgatgtttgccttcattaacacaaacaccgcggctgcagccggaattatcggctggattttaatcgaatggatgctgaataaaaaaccgaccatgctgggcgctgtatcaggcgctatcgccgggcttgtcgccattacgccggctgccgggttcgttacgccgttctcttccattgtaatcggtttcatcggcgggcttgtctgcttttggggcgtttattggctcaaaaagactttcggttatgatgatgcgcttgacgctttcggcctgcatgggatcggcggcacatggggcggcatcgcgaccggtttattcgcaaccacttccgtcaatgacggcggggcaaacgggctgttttacggcgatccgggactgctctggaagcagattgcggccattgcggcaacctatgtatttgtatttattgtcactttcgttatcattaaaattgtaggtctgttcattccccttcgcgccagtgaagaagaagagtcacttgggcttgatttaacgatgcacggggaaaaagcatatcaggacttataaagtgaggagtggcttagatgagcggtcaaatgttcaaggtagaaatcgttacgcgtccggctaagtttgaaacattgaaacaggaactcggtaaaatcggagtcacatcgctgaccttctccaacgtacacggctgcggccttcaaaaagcccacaccgaactgtaccgcggagtcaaaattgaaagcaatgtgtatgaacggctgaaagtggaaatcgttgtcagcaaggtccccgttgatcaagtcgtggaaacggcgaaaaaagtgctgaaaacgggagagcccggagacggcaaaatattcgtctatgaaatcggaaacacgattaatatccgcaccggagaagaaggaccaggagctttataaacaggcagaacgcccggagacagaaatgtcccgggcgttttttctagcttcattaaaaagaagaaacctttttttcatgcgggacaggccgcttatgccgtacgggttgttttttcgcatatgtactgatattgaccagtatgccgcacaaaaacagcgtcataattaatgaagaaccgccgtagctgataaacggaagcggcacacccgtaaccgggagaagtccgctcatcgctcccaaattcaatacaacctgaaacattaattgaaacgtaattccgatggcaagaagcttcccgaacgggtcatcagcccgcacggccgtttttacgccgagaagcattaacgcaaaatataatcccaaaacgatcagaacaccgaatatccccagttcttcgctgatcacggccataatgaaatcggtatgcgcctcaggcagatagttcattttttcaacactgtttccaagccctcttccgaaaaacccgcctccggaaatagcaaaataggattgaatcagctgatagccgtccccgttcgcgtcaccaaacgggttggtaaaggaaacgaggcgcttcacacgataggaagcggaaaatgcgagataaacaaccccggacaccgccgtcgcgccgagcacgaacagatggcgctttttcaagccggcacataataaaatcgacccgcacgccgccaggattaaggaagccgtccctaaatcaggctccgccaatgtcagcagaaaagcagttcccaaaatcactaaaggcggcagaacccctttcacaaattgatgaatgtacggctgctttttcgtataaatcgaagcgaaatacaaaatcatcgcgatcttagccaattcagacggctgtacgacaagcgggcccgctcccagccacctgcgggaaaaattccgctccagcccgattcccggtatcaatacgagcagcagcaataccagcgaaccgaccacaaacagcggtacaagccgcgcataccgcttatacggcagacaggcggcaaatagaaataagcataatccgatcagtaaagaggtactttgtttatggaagaaataggatggatctccataccgctgagaccccatcacatcactggcgctgtacaccattaacaagccgaatccgcaaagcagcataatgacaaacacaagcggcagatcggcgtttttcaaacgtttcagcaacggacaaaactccttcggctattcttttcccgcatacttgacgcacagtaatacagtcacgtttcattctgtttacttttttatgattatttttaataccaattgtgtctcatagaaaaaagcattacactgttcatataaaataaagataaaaggtgatatttgtgaattacgaactatttaaagcgatcaatggtttgtcgcaccatagtgccattctcgactctatcatggtatttattacggaatacgccatttacgcctacgcccttttcctgcttgccatgtggctgttcggaagcacaaaaggcagacaaaacgccctgtacgcgggcttcacgggtgttgcagcgcttatcatcaactacctcatcacgaaagtctatgtcgagccgcgcccctttgtcgagcatacggttcatacgctgatcccccatgccgcggatgcttcatttccgagtgaccatacgacaggcgctttggcgatttcaattgcgattctgttccgcaacaaaaaactcggctggccgcttgtgattttcggccttttgaccggcttctcaagaatttgggtcggccaccattatccgatcgatgtgctcggaagcattatcgtttccctcattgtcggattcctgctgttcagattttcaaatgtgcttcgtccgattgtcgatctgatcgtgcgaatctatgaaagtatcgttcataaaagcaaatcgacaaaccataatatataaaaaaaaaagccggcgtctgtcacagactgccggtttttgtatgtttggctgtgtgctttttcctttgtaaagcacaaaatgcggcaatgccgagactgtcaatcagcacatcgcggaggcatccgtttctgccgaaaaagagctggacgatttctgtcaggaaagcggcggccaatgcatacagcaccgccctcttcatgcgcctgcgctccctgaaaaacaaataggcgagcacaaaaaatgaaaacgcgtgcccgagcttttgaatcgccgcttccggtatggcgagctccgccatatcgaacacaaagaaaccggacacatccggatgcggcgtgaaacggaaggacaccgtctgcgacacaatcatatcgtgaaagctttccgtcaaagccgaaacgaaaacaaagacgagccacccggccgccagacatttattcattcagcatctccttctttttctactagtataaaggcacatgcgggaatatgaaaagcgcctatctgagctgataggcgctttgggatcaagattacttgcccgaatctttcattgagccgtcatctttaccatctgtcttgtcttttgtgccgtcctctttgtcacctggtttttcttcggtttcttttttaggcgtcacatcttttttctcggaagactgctgaattgacccttccgtttcttctgtcacagcgtttttctcttcagccgccgctttttcaatagatgttaccggcttgtccataaaattgagcgggttcatcgctacgccgtccttgcggatttcaaagtgcacgtgatttccgctttcttcactgtaaaggttttttccggatttaccgatgacctggttctgctttactttgtcgccctgatcgacgctgacttcagataaagactgatagacagtagacaggccgtctgagtgttcaatttcaaccacatatcccagtaccgggtctttagcagctttaacaaccgtaccgctcagagaagcagaaacatcaaatgattttccgtctttctcagctaagtcaattcctttactgaggctgtacgtgttattatagttaacaagtgctgcttctttctctttttttgcggcatcagtttcataaaactttttcacaacagaaacattttcagaatgagcagccggcattgcgacgttttccattgacttgcctacttcgacggcatcgtctttgccgctgtcatacgcggagtttccgccgttgttcgtcagattgtccttcacatcattcgaaacggattgataccaaaggacagctgttaaaatgacggccgcactgactaagtagattgcagggaatatccagcgtttacgaaaaaaccgctgaagttttttgacttgagaagttttcttttcttcctctctcatttgttcatcacctcagcaacattctgaacacttttctgaaaatatatacacattcataaaaaacttttttggaaatagtatgtgcagattgcacttgattatgtaataaaatgtgaagggagatcccggaatatgaatttgaccctgcgcaaagccgtattggaggatttagatgcggtggtggccatatacaactcgacgattgcctcacgaatggtaacggctgatacggaagaagtgacgcccgaagaccggatggattggtttttgcggcacacggaccggcgcccgctgatggtcgcggaagatgaaaccggcaaagtggcggcctggatcagctttgaaacgttttacggccgtcctgcctatgacaaaacggcggaaatcagcatctatctgcatcaggattgccgcggcaaaggagcaggaagctttctgctgaaagaagccctggcactcgctccggcaatcggcatccgcagcctgatggcttttatcttcggacataatgtgccgagcattaagctgtttgaaaaattcggttttaccgaatggggcgtattcccgggtatcgccgaaatggacggaaaacgatatgacttgaacattttagggagagaactgtcatgatcaccatcgataaagacaaagacgaaaaccagccgctcaataaaaaagcccgttcccttgccgacatcgccaaatggggaaagatcaccgccgtgtttctgatcatcacgggctctctttccgctctgtcagccattgtgacgctgctcggagccattccgggggttctgctcatcatttccggcgtcatgctgatgcgctcggcaaaagcggctgccgcccttcaggaaggactagaagaaaacgcggaagaaaatatgcttgcacattacgcgtcatttatcaaaatgcagtttttttacgcggcatccagtgtggtattgggcattctcgcttttattttagtcgtcatcttcgctgtcatcggaattatcgcttatcacagcactgatacgtatgacacgcctgattcatattactatgagaacgacccggtgtttgaatgacaaaaagagctgatcgcgtgtcagctcttttttaataaagcatttcttttttccggtcttcttccgttaaaaattcaataaagctcttcatcgcagacggctcctcggcaatcagccgggtataggcgcttttccgttcctcggacagaatgtcgctttttctgattctgttcagcatataaaggcggatcgttttttgcacctgtttccgctgatagccggcttccttaaaaaacgcaagacccagagccgcaaggagggcaaaaatgccggccgatacgagagctcctctcccggaaggggcctgaatcaaaagcgatgccagatgaaacagactaaaagcggcgagcgggaaagcaagaaaacggtaaatgatgctttttttcatcagcggcgcgatggcgatttgtattttctgaatttctttttttatgaatcccggcaattgttccgcatgctccagcttcatgccctctcccctttgctgtcatttttgtcttctttttcatatatgcatattttaccgcacccggaactttctttgaaagaaaactgcattcatctttgattccggctctttattctttcaaaatgtcaatgttataatttgaaatgggaatcagattgctgcacttgtcggaatactaatgggcacagtcttgataaatatgatatagcggggttgcaaagtgagcatttcatttattttattcggattttttttcgttttaaatatacttttggccgtcatcatgatttttaaagaaagacgcgatgccagcgcttcatgggcttggctcttggttcttttttttattcccattttagggtttattttatacctgttattcggccataacctgagacgcaagcatctgtttcaatgggaagaccgtaaaaaaatcgggattgaaaagctgctgaagtctcagctgaaggatctgaagtcgaggcaattccaatttaacaacagagcgactgtggataataaagacctcatctatatgcttgtcatgaacaaccacgcagtctttacagaggataattcggtggagattttgacggacgggcgcgataagttcaaacgcttaatgaaggacatttccaacgcaaaagatcacattcaccttcaatactatatttataaaggtgatgaactgggaaaaaaattgcgcgatgccttagtgaaaaaagcacgcgaaggcgtaaaagtcagagtgttatatgatgaactcggttcaagatcactcagaaaaaaattcttcaaaccgctgcgggacgccggcggccatgtggaagtcttttttccttccaggcttcgtccgattaatttgcggctcaattatcggaatcaccgcaagctcgtcatcattgacggcgaaaccggctatgtcggcggctttaacgtcggagatgaatatctcggcctgaatccgaaattcggctactggcgcgatacgcacctcaggcttcaaggcacggcggtacacgccattcagacacggtttatcctcgattggaaccaagcctcccatcatcatacgctcacatacgttccgaatcattttccggaatgcgagccgaagggcaacgtcgggatgcagattgtcacgagcggaccggactcagaatgggaacaaattaaaaacggctatatcaagatgatctcaacggccaaacggtcgatcctgattcagacgccttactttattcctgactcaagtcttttagatgccctcaggatcgcctgtctgtcaggcatcgacgtcaaaatcatgattccgaacaagccggatcacgctttcgtttactgggcgactttatcttacatcggcgatcttttgaaagccggagcctcagtctacatttacgataacggctttattcatgcaaaaacgattgtcgtcgatgatgagacggcttcagtcggtacggcgaatatcgacgtcagaagcttcagacttaattttgaagtcaacgcctttatttatgacgtcaccattgcgaaaaaactcatttcctcatttaaagaagatctgctcgtctccagaaaatatacgtatgaagaatatcaggagcgttcgctgtggatccgcattaaagaatcgatttcaagacttctttcgccgattttgtaattcccggggtgtttctcgggaattttctgatataaaaacggacacggcatgaaaaaacacattttatattcaaaagaatgaccgaatagtgtataaatgaaaagtgagtatttttttgtaaaggagtgccatagtttgaaacctgaatcagtgaatcgttcgcttatttctatttcgaaatggggaaaagcgacaggtattttatttattatcgtgggtgcgtttgcggcgctgtcgggcgcgtttttctttttaatcggagccattcccggcgttctgcagatcattgccggcatttttctgatgcgctcggcaaatgaagcgggacagatggcggagcagttcaatgaactgacagaggaacatatgctggagaattatgcaaagttcgtgaaaatgcaggggatctacctgattgttacggtcggcttgtccgttctcggtatcattctcttcattgtcctcatgacgctcggcatcgtggacggcgtgtttaataatattgatgccaatacatattaaaaaggaaaatcccggcgcatccgcccgggattttttcttattccgcttcttcaataacggtaaagcgttcgtttttgtgcttcggatttaccaatacggcgatggcataatggcgcagctgatgcagctgatgcagctgtctgcagatattctttcagacattccggcttcagctcaaaaaagttttttcaaataaaacttttcctcagagtttcaactgaaatcacttaattgttcgactgttcctgatcaggtttgaaaataaggataaaagccctgatggaacaagaccacttatcatacagttttttgggtctttgtaattaaattacaattgttcttaatattcactcatgtattcatgctattatattgaaaggaacgatcaaaagcgttggcgttcgttaaatatttacgagtgctgcctcatgtcaaagtcagaaaaaatagtataggaggtaacatatgtttaagtttaaaaagaaattcttagttggattaacggctgctttcatgagtatcagcatgttttcggcaaccgcctctgcagctggcacagattactggcaaaattggactgatgggggcggaacagtcaacgctgtcaatggatctggcgggaattacagtgttaattggtctaataccggaaatttcgttgttggtaaaggctggactacaggctcgccatttagaacaataaactataatgccggagtctgggcgccgaatggcaatggatatttgactttatatggctggacgagagcacctctcatcgaatattatgtagtggattcatggggtacttacagacctaccggaacgtataaaggtactgtaaacagtgatggaggtacatatgacatatatacaacaacacgttataacgcaccttccattgatggcgataacactacttttacgcagtactggagtgttcgccagtcgaagagaccaaccggaagcaacgctgcaatcactttcagcaatcatgttaacgcctggaagagccatggaatgaatctaggcagtaattgggcttatcaagtcttagcgacagaaggatataaaagcagcggaagttctaatgtaacagtgtggtaacagctcatctttaattaggggcagctaacgggctgctgatcgttccttgagaaattttataatgattgttaagaggcgaacggttttggcattaccggaggcaggatatcattttttgtttaacttgctcacagctgacaccttcacataagtcttaagcaaaataaaaatatcccggtaaccacctcctttagtttcggaggatttcttcattaaacagatcgcaatcccgcatccaggcttgtctgaatatggggtcaaaaccgtgatttcctcattatcccttgtaaccatttttgttacaccgctagcggcatgaaccaatctctttttaacaaaagagatgattcattacatcataaagggacttgctcgcaagttcattctccattgcccgctgtacgcttccgaacgtctcatcgagcgcgcgctgaatatttttgccgaccggacagtcggggttcggattgtcgtgaaccgcaaaaagctcttccctattctgcaccgccctgtaaacctctaagagggtaatctccgacggatcttttttcaggctggctcccggaacacccgcccgggaagtcagaatacccgcttttttcagctggctgatcgttctccgcacgacgacgggattggtgtttacgctgcccgcaatcatgtccgatgacgcccgttcatccgttgagatcagcgatagaatgtgaatggccacagcaagacggctgttaatcatgtttttcaccaccgttgtaaccgcaatagttacatttcatttgtttgtcaactactaatatacactaaaacgggcggcaggatgaaatcaagttggcaatagagggtaaacaggccggcgggaaaccggccgaagagggattaaaataagaaataacgctgtccgagcggaacatagctgacgggctggcatgccagctcttctccgtcggcgaacacctgataggttttcggatcgacttgtatattcggcattgcgtcattcagcttcatgtcgagcttactcagcttacggatattccgtacgggagaaatcattttttcaaggccgagcttttccggcacaccgtttgcgataccggcctgggacataaatgtaatagaggtatttcggtttgctttaccgtatgatgcgtacatctgccgcataaacacgggctcaggcgtcggaatggaagcattcggatctcccatctgggcgcgggcgatcatgccgcctttgagcacaagttcaggtttgacgccgaagaaaaccgggtcccatagtacaaggtcggcgagctttcctttttcaacggaaccgacttcatggctcaggccgtgagtgacggccgggttgattgtgtatttggcgatatagcgtttggcgcgcacattgtcattgccgttttctcctgatagagcgccgcgctgttttttcattttatcggccacctgccatgtcctgataatcacttctcccaccctgcccatcgcctgcgagtcagatgacgtcatgctgatcgcgccgatatcgtgcagaatatcctccgccgcaatggtggccgctctgatgcgtgaatgactgaacgccacgtcttcaggcacttttgaatctaaatgatggcagaccatcatcatatcaagatgctcgtccatcgtgttgacggtatacgggatcgtcggcgtcgtagaggacggcaggatattggcgtaagatgcgagtttcataatatccggtgcgtggcctccgccggctccctctatgtgatatgtatggataacccggtcgccgatcgcatcaagcgtattttctaaaaagcccgcttcattaatcgtgtctgtgtggatcgccacctgaatgtccgcctcatccgctgcttccatgcaagctttaatggcgcttggcgttgatccccaatcttcatgcagcttcaggccgatcgcgcctgcttccacctgctcgatcagcggcgctttatcggatgcattcccttttcctaagaaaccgacgttgatcggaaactcctcggccgcttccagcattctcgacatgtaccatgcaccggatgtacaagtcgtcgctttacttcccgtcgcaggacccgttccgccgccgagaagcgtggtcacgcctgaagaaagcgcgacttccatctgctgcgggcagataaagtggatatgcgtatccaccccgccggccgttacaattttcccttcgccggaaatgacttctgttccggcaccgataatcatgtgcgggtccaccccatccatgatatcaggattgccgctttttccgacgccgacaatccggccgtccttcaccccgatatccgccttgacgattccggtataatccaggataacggcgtttgtaatgaccagatcaagcgctccgtctttcccggtgatacgcccgttctgccccataccgtcccggattgttttccctccgccgaaaatcatttcttcaccgtaattcgtgaaatctttttcgacttcaatccataaatccgtatctccgagtctgactttgtctcccgttgtcggtccgaacagttctgcgtattgctcacgtgacattttcatcggatcgcctcctccatccatccggcttttttaagatttgacagagtcttctcttttccccgctcatccatatacgtatcggccatgccgttgagacctctgaccgtttttcgccctccgatttccacgagcgtgacggttttctcttctcccggttcaaaacggacagatgtgcctgacgggatatcaaggcgcatgccgattgctttgtcccgattgaaggaaagggcgccgttggcttcggcaaaatgaaaatgcgatcctatctgcactgaccgtgttccgttattggtgactgacacctccagcgtcttccggccttcattaatggtgatggttccctttgcgacttgaatcgctcccggcttcatgacttcacctccgctttgatcggctgatgaacggtgacaagcttaaccccgtccgggaacgtcgcttccacctgaatgctgtccagcatttccggaacgccttccataacatctttttccgtcaatacattgcggccggattccatcagctcagcaacgctttttccgtctctcgcgccttccatcagatagcaggtcaaatatgcggcggcttcgggataattcagcagaacgccgcgcgccttccgctgcttagcgagctctcccgccgtaaaaataagcaatttttcttgttcaaccggtgtcagtttcatctgtattcccccttagtgatagtcaaacacaatccgcatggtcataccgaaacgatgcaggcggccgtcacccccttcacctcatgaaatgttaagtgataaaagttattcgacggtgaacgacccgattccttttgcagaaattaccgatttctcatttttttcttcaacaaacgtttaatcaaatgtgaagaaaggttacattctatgtgaatattataaagaaatcgccggagaatttatagaatatttaaaaatttagtgaatattaaccaaatgaactggaatttttgtcatttctcataacaaaaagcccaaaatattttgggcttttgctgtgtttcactatcaaattaatcatcactgagtttatctttcgttttgccgacacccttttgcaggctgcctttcgctttgtcttttttaccttccgcttttaagtcggacttgtttgccatgtcgcctgctttgtcctttgcttcccctttcattttgttcatgccgccttttactttgtcttttaaaccgttatcttgactcatgatctcttcagctccttttttgttctgtgtacttgttttcttccctttcagcctgatagcaaacatttcaactctcaattattgatttcacaccgttccccgtagcggagcactttgtaaacagccaatccgtctgacagcttattatccccgtattgcaccggcagaagggcaaagaaaacataataagttgaaaaatagacaaattggtaaaaaaataagtttggctcgaggacatcttttatgatcagcagatttattaaaaagatagaagcgagattaaacagacagcctccggaatagacgagcgcgctcgtcagacggttatctatccgcaatttgccgaacttgcagaaagaatctatgaagtagatacgccgaacctgaatcggccctacttttaaaagacgtttccccattccgatatccaatgatgccttgcctccgaacagcatggccataaagctgtgtcccgacacatgaatgacagacaccatcggcagaatgatgagaaatgatacgaaaaactttatcatatcattgaatccgaacaacaaatccctccttcccatcgtacttttttctctcttttgcgatttttccgtttttttctatggtcaaacgttatgatgtgcataaaaaaataaccatctgctgatcagatggttaagaaaattatatatcgtataaacattgttctttttgaatgttttctctcatgcgaatcgctttttcataaaaatacgccgcttctttatattgctcatgtgcgcttgtgtaaacggcggcctccaaggcgaaatcttcaatatacacatacagcgatttttcattcatatagtcaaacacttcatggattaaatccatattgagtgactccaaataaagcgcttgtaaaaacttatacttctctaaactgaatcgatcgccccgttctttcgcgatcatgacccctctttcataataggtaagggccgcttggtcatcatgcagcctgaaaagggtgtgcgttaagctgaacagcgccttcggaagctgttcaagctgatgctcttcaaaaacgggaaccgcttttctaaagtaccgggccgcttcatccagatcgcgcttttcagaataacaattccccagattgtaaagcgaagacccgatcaggcggggctgtccttcaagcaaagaaaggcggagggcttcgtctaaatgctcaagcgctttgtcgtagtttttgcagtcgatgtagtttcctgagatgacgaaatggcattgaattctccgcactctgtagaaatcgtgtttcatatacgtatccagcgcctgaatcccgtgattcatggaaaaatgagtctgcttcatgacataaaacacttcagacatcttgaaatggaattccgccctctctatatcatcctcgacaaatgaaaggagtttttccgctttccggtaaaaagaaatagccgcaacatagttattgtgatcgaattcatacatccctctgaacaaatggaaataatactcagacagtcccgatatgctgtccgtgctttcgatcgtcttttgcagctcgctgtactgaatctgtgattgttcggtgcattccggcttgacgtaatcaagcataatatgatggcggtagctgatcagctgataatataacagcagcagctggtcttcctccatacgttgtatatcctcatcaatttcctctttcagctttatggcatcagccgcttgaaacgctaaaatgtgcttgtaccatttgttgatcttgactccaacttgagatgacggaatctcgtatgcggtcatgcccctttcacaaccttttctaatttctattggttatattttaacatattgtatggctttggaattgcataacttgattgtcctgcatcaaaattcctatcatatatttcggctgtcatcggtattttttgaacagaccgctctcatattgtgaataaaaaagcctgcccttgtccgggcaagcttttcttcatccgcctatataagacatttccactttctttttcccatccgttttagaaagcgcgcggtcaattgaatactgatccgtgcgatttctccagacagaagcgatggattccgtcaattcatcatcggtcagaccgccgcgcacgagtttccgaacatcatagccgcttgacgcaaacaggcacgtaaacagctcgcctctcgccgacaggcgcgctctgttgcaggaggcgcagaatgcatccgagacggaggaaatcacgccgatttcgccggaaccgtcaagatagcggaacctggaagcgacctctcctttataattcgcttctatcggctccgtcggcatgtgctggttgatcagatcaataatctctgccttcgtgatcacgtcttttttattccattgattcgtattgcctacatccataaattcaataaaccggagaatatgacccttttctttaaaatagcgggccatcggcaggatatctttttcattgacgcccttttgaacaaccatgttgattttcacaccgagtccggccgcttttgccgcctcaatgccctcaagcaccttgttcaccgaaaccccgcggccgttaatggccttaaaccgctcatcctctaaagaatcgaggctgactgtcacgcgatgcagccccgcctgcttcagtttttccgcatacacgggaagcagagagccgtttgtcgtcatcgcgatatctttaagtccggggatgcgcgcaagttttttgatcaattcaggcatatcttttctcatgagcggctctccgcccgtcagcctgattttttcaacgccgaagcggccgacaaacagcttcgcaagccgctcaagctcctcgaaggagagcaattccgtcttttgtaaaaatggataatccggtccgaataattcggctggcatacagtacgtgcatctgaagttgcagcggtcggttacagagatacgaagatccctgagcggcctttcccttttgtctgtcacccggcgcgtttctgtattcataagcccaagacccctttctattgttcaacccgttcaggatgtgtgtatacgttaaatgatccgtttctgacaaaacctatcgcggttatgttcagctcttccgccatttgcagcgcgagctccgtcggcgccgattttgaaatgacaatcgacacgccgatttttgcggcttttaataaaacctccgaggaaatccggccgctgaagacgatcagcttgtcacggaccggcattccgtttttcaaacagcagccgtacagcttatccagcgcgttgtggcgcccgatatccgtcctcataaagagcagcttttccgtatcgcacagcgccgcattatggacgccgcccgtttcctgaaaggtgccgcttccgctttgcatctccttcatcaggcgaaggcacgtctcaggagttatggtgatacggctgacggcggttttggccgttttcacatcctgctgaaagtaaaaatggcggcctttcccgcagcatgaaccgatgaccctcttcgtatagtctttttgctcaagcactccgggattcgtcagttcaacatatgcaaacccgagactttcatctatagtaaagcttttgatttctttttcaaaacgaatgacgccttctgatgcgagaaatccgatgacgagttcctctaaatgttcaggcgtgcagacgagcgtaacaaattcctgcccgttcaccatgacggtcagcggatactctgaaaccatccgatctgccgtctttgttaatacccctttttcatagcggtatatgtctcttaccgctgttgttttttcatccactgttttcccctccgcagtatccttctcttttattcttccacaatccctgtattttgtcgaatttgcggtttaaaaaaagagccctcttaggactctatgtttcattgcgatgatgtctgctcagaatggtgaataaaataactgcggcgataatggccaatatactgacgaatatgaaggcggcaagcttcagaaaaattcccatcagaacaaaaacgactgccgccagcactaatataatgcctgctccttttaacaacagcgttcatctccttttatccgtatcattcccgcggttccgttttctaaacaaaaaagacgccgcgcgggcgtccttttttaacctattcttttgctaaatcctttgcagcgtcttcccaagcctgtttgaactcgtccgcgctgtcagctgagacatatgtgccgcctcccgcttccgccgctttttcaaggctttcgcttcctttcatgccgaagttgaagccgatgatattgacgatcgtgttgacgttcgctttacggagcttttgaatttcggcctgaggattaccgccgcatgtttcttcaccgtctgtgatcagatatacgacgtttttccccgtggcgccggcccgctcaaattcttctcgcgtatcagagagcgctttcgcaatcggtgtccagccggtcggtttaatcttgctgagtgattgctcaaatggagtcacggcgtacggctgaaggccgtataacgtttctgtcgcattacatgatacggctttgcctgagtttttattattgcccttatgcccgaatacccgaagcatcagattcgtgtcttcaggaagaacttccgcaaaagaagtgacagactctttcgcaacatctattttacgctctccccctgttttttgtatcatgcttccgcttgcatcaaacagcacagcaacgtttgtttcttcgtgctttttctcagctgcaaaaacaggtgatccgagtgaaagcgtcaaaagtccgacaatccccgcagtgaacatttttttcatttccttcattcctctccgtttgtttttggccgatgggccctcggctcttctctatgctagatgacgtgtatgcaaaaagatatagggcgggattccttttgtataagcggctgtacaccgttaaaaatgaacagaattatgcgcatcatcctaaaaagattggataaatgatgacagatttaatgcctttttcgccctttttgtaatataagtccggaatctgattctttttacagttttctcttcatcttttcttgaaatttttgttaaataaaaataaaaaaaagggccgataaacggcaccttttcttattccgctaatgaactcgctgccattgtaaagatgcggttcatatccttttggctgtgagcttcgtaatattttcctccgcccgctttggcaatctcgtgaagctggccgttgaagccttccttaaagtcaaagccgatcacgttgactttaatatgctgtttacgaagttctttcgctgtcttaacaggatctcctccgcatgtctcctcgccgtccgtcaacaggaaaacggatttactgcctagtttgtgcaaaccggtaaaggaagccttcgcatcctctaatgcttttgcaatcggtgtccagcccgtaggcccgattccgttaagagagttaaggaagctctgtctgtcaaacctttggaatccgtacacaccgcgaatggattcacaagattgaacctttccggagtttttattattgccttccgaaccgaaaactgtcattctgacctgtgatttagatttaatttgatccgcaaaacggacaatttcttcttttgccatgttgtatttagaaacaccgtcaatccgttttgccatactgccgctcgcatcaagtaaaatggcggtattgtttttaaatgaaagagtcttctcgtttgcattctcggcagcaaaagcaggagatgcggcagtcagcatcaatccgagcatgagtatgagtgaaaatgtttttttcattgctttttccccttttcaatagatttacgttcaacgccgaacaatatttatcgtaaatgagatgaaaagggaaataaataggacggcgttcctcattatttttgcgtatattcacatagaagcggcatttttatcagtgatttacacccggcgctcagccttcaatcgacatttgtcagcctttaggctttcgttatatgagtctgttggttgctttaccgtttatggaatagttttcaaaaaaaacagacgctcatgaaagcgtctattttttcgccatatatttgtttaaaaatgaatctgcttcggaaatgtctactccctgataataatgcttgacgatgtccgccactgatttcccctgctccgccatgtaattggccccgtactggctcatgccgacgccgtggccgaatccttttgtcgtaatggtgatgctgccgccgtttcgtttccattcaaagtcggcagaacggagtccgagtttttcccggatgtctcttcctttcagctttttgccgttgatgacggccgttgccacttgatggcccggcgttctggctgtaatctgtcccaccgtgttttgtcccgagagctgtacgccgagcttttgctgaaactccggcacactgaaggtctgggtggcaagatatttcggcgattgcttatcccacggacttttcacgctttttaaataaggaatggcgcttgtccaataggcttccgcattttccgtatacccgttgctcgtagagaagaaagatgcctcaatcggcttgttatcgtacgttaaaatctttccttgcgtgccggccaccgcgtttgtgattttcttgaggttgtgtgcgtacttagaaccccattcttttttcagctggcttttgctttgatagacttggaacatttgcgtatcatccaccagtgatcctttcggcgcctggacggctgagtcagcgaccatcagtctgacgatgaatgtccgggcggcgagcgcctgggcttttaaggcctccggtttaaagtttgcgggcatttcggaagccacgacaccgatcacgtactcttcaagcggaatgttttctacagaatgattggatgtccgataaaccggaatggatacaggtgattctttcaatgtttctgctccttttgtttctcgtgtggtgtgtgctgttttgtgtccgggctctctgtttacagctgctcctttttctgcctgaaacggaaggacgagaatggtggggactagaagaataagtatacacagcccggatagtagaaatacaatcggtttcatatatcagctgcctcctgcttgggattcgactctacttcatcttatgggcagggacaagctaatatgacttccttttggacagaatctttattccatttttcacgcgaaaaacgtattcttttttggaaatcagagcataataatgatgataaaccataaaaaaacagtatgccagattgacatactgtttttacagccattatgcgtttagatcagttacgacttctttgctttcttgttcagcggccgtttcatcaacgacacgctcgatgtcagcgccaagagccgcaagtttttgatggaaattcacataaccgcgatccaagtgcttcagttccgtgacgcgtgtatgaccttcagccactaatcccgcaagaatcagcgccgcgcccgcacgcaggtccgtagcggcaacttctgcgccttgcagctgtacaggaccgttaatgatcacagaacgtccttcaattttaatgtcgccattcatccggcggaattcttcagcatgcataaaacggttttcaaacacagtttcagtaatcatgcttgttccgctcgcacggagaagcagcgccatcatttgcgactgcatatcagtcgggaatcctgggtgaggcatcgttttaatgtcgatcggcttcagctgggcaggaccgatgacacgaaggccttctccttcatccgtaattttgactcccatttcttccatcttcgcaattaaagacgtaagatgctcaggaaccgcacctttgactaatacatttccttccgtgatcgccgcagccaccatgaaagtacccgcttcaatacggtcaggaatgatgttgtgtcttacgccgtgaagcttctcgacaccttcaattttaatggtgcctgtgccggctccgcggatttttccgcccatcgcattgatatagttcgctaagtcaacgatttcaggctcttttgccacgttttcaagcgttgttgttccttcagctaaagcagctgccataatcaagttttctgtcgcacccacacttgggaaatctaaatagatttttgcgccctgcagacggccttccacttctgcttcaataaagccgttgcctactttgatttttgcacccattgcttcaaagccttttaaatgctgatcaatcggtcttgagccgattgcgcagccgcccggaagcgctactcttgaatgacccgtacgggctaacagagggcccataacaagcactgacgcgcgcattttgcgcacatattcaaaaggtgcttctgtttctaaagcgtaagaagcgtttacggtaacttcattattctcaaaatgcacatctgctcctaaatgacgcaacacttcattaattgtatatacatcggagagcgtaggtacatcacatattacgcttttttcttcacttgctaataaagatgcagcgataactggtaaaacggcattttttgctccttcaactttcactgtgccgtttaacttctgaccgccgcggacgatgattttttccaaggtattcccctccgcgtccctatattctctatattaatattcagtcgtcacgattggtgtgccaaccgtaacggtatgtttttcgcccattcccgcacttctaagcgcaacttgcacattcatcttatgtttcgatgtcatgatgtaatctgtccacttatatgtaaatgcagaaacagaaacgaaatgaggctcaactacatgttcaactggacttgcttcaaattctttcatgagctgttctgcttttttttgcaaaacaatactcatattatcatttaaatgacccttaagacaagtaaaaataaatactttattttgaaatatgtcatgtgcctgccgttcaaactgttcatatgtatcattccagttttccggttgctccgggctcatttgctcatataataaatacgaagttgggttctggtttttgagggtagtgacgagctgcagtttaaaagttgtgtgattttttttgtcagaatacgtgccgacggcctttacgattttatcttcccgcgcggattcccaatgatattgcggatactgcgtcttcagttcttttaccttgtcatcaaattcactcagtgacaggttcagattttttttcgcatgaagcgtccattcatctacagtgacctgttgccgctccattccttcggcaatctgggcaagcggagacagctcacttgcatgaatggaatgaaataccgctattaaggcgcttaaaaaaacaaaaaataagatgatgcggcctgctctttttttcttcatatcgatctctcccccttactcccatttttgccggagccggggaaagcaatacatggaaaacttcgtcaaaactcgccaagcgggtgaagaaaattggtttctcacccagcgattcccttcatttcaacagacgaaacatcttaaaataagtatggaagctgtttcgaataggtaagataatctaaaaagaagtcagcgactgccgtaccgatcgcaatggtaagaagaatgatcagcagcctcgcctgcactatttttccttttcggatcagcggatcaaagttgacggcctgaagcgcccaccatgtcaccgcaatgcataccaggtgaaccaggatgctgattgcggcctgctgccccaatacattcacaaattccatctcctttcattttttccgcccctcatatcctctcttattatataagaagaagagagaaagatgatcatttttacatcagaatttttatccaaaattaggggcaatccccgcttaaatgtccgttctccggcatgatatacttttttggaaaggagatgggaatatgaatcattccttttttcatccggaaaagcagtatggagaaacacttcccgtatttgaccacgagtgggaagcgatagcattctactatgattatagacagtctcaaacagaggaactgaaagaattatgtcagtttttcaacatttctcttgattattcacgcggcagcctgctggaagtggaagctctttacttccgcagcatacaagagctgcttttggcggattggaacctgccgattgacgaatttgagaaaatgctcagtgtgtatgtcatcgattgcgccatcagacaccatgacgatgccgcatgggtcgtcaaaccttatccgtatacggacggcgcctatacgacgggtgtgcggagaggaaacaaaacgtggcacaccgacaactgctgcgaacatttatatctgcaaaaagaagaggatcatccgcttatcggcgtctatgaatctcttatgcgttaatatagaaaaagaatccttctcagacagccgagaaggattcttttttagtttcctgcaacatccaatctgtttacagcccgctgtagcgcaagctcagcccgacgaatgtcagtatcatctgatcgtttgttcaaacggtcttccgcccgctttttcgcagcaagggcgcgctctttatcaatgctttccgctgtttcagcggcttgtgcaaggatagtgacctgatcaggacggacttctaaaaatccgccgctgacagccgccaattcggtctgtccgtcttttttaaggcggacagcgccgattttaagcggagccacggtcggaatatggccaggcaagataccgagatcaccgctctcggctcttacacttaccatttcaatatcagcatcatatactgggccgtcgggagtaacgatattgactttaacggtcttcatgcttttaccctcctaggaccagattaaacttctacacccatctcttttgcattctcaatgacttcttcaatgcgtcccacaagacggaatgcatcttccggaagatggtcatatttaccggaaaggatttctttaaagcctcgtaccgtttctttaacaggcacgtaagaacccttttgtcccgtaaactgctcagctacgtggaagttttgagaaaggaagaactggatacggcgtgcgcggtgaacgacaagcttgtcttcttcacctaattcgtccataccgagaatcgcgataatatcctgaagttctttgtaacgctgaagcgttgactggacttcacgcgccaccgcataatgctcttctccgacaatttccggagcaagcgcgcgggaagtggaagccagcggatcaaccgcagggtagatacccatttcagttaatttacgctcaaggttagtcgtcgcatccaagtgagcgaacgttgtcgccggagccgggtcagtatagtcatcggcaggcacgtagatcgcctggatagatgtaactgaaccaacgtttgtagacgtaatacgctcttgaagctgacccatttctgtcgcaagcgtcggctgataaccaaccgcagaaggcatacggccgagaagcgcggaaacctctgaacccgcttgtgtgaaacggaaaatgttatcgataaagaacagtacgtcctgtccttgtttatcacggaaatgctcagccattgtaagacccgtcaatgctacacgcatacgtgcgcccggcggctcgttcatttgtccgaagaccatggctgttttcttgataacgcctgaatcgctcatttcgtagaaaaggtcgttcccttcacgagtacgctctcctacaccggcgaatacggaaataccgccgtgctcttgcgcgatgttgttgattaattcctggattaatacggttttacctacgccggcgccgccgaacaatccgattttaccgcccttgatgtaaggagcgagcaggtcaacaaccttaattcccgtttcaagaatttcaacctcagttgaaagctcatcgaatgaaggagctgatctgtggatcgggtccttttgagcatccgcaggcagcggttcatttagatcaattttatctcccagtacgttaaatacgcgtccgagagtcacatcaccgacaggaacggaaatcggcgcacctgtatcaacagcttccattccgcgctgaattccgtccgttgatgccatggcaattgtacggactgtatcatcgcctaaatgaagagcaacctctagcgttaggtcgatgcctacttcattttcgcctgtagctggctgtgaaactttaatcgcattataaatcgcaggcaagtggccgtcctcgaaacgtacgtcgacaaccggtccaagcacctgacttacgcgtcctttcttcatcgctatccctcctgacaaaatctttctattctaaagcggctgcaccgccgacaatttcggtaatttcttgtgtaatcgccgcttgacgcgcgcggttatatgaaagcgaaagtgaatcaatgagttctttcgcattatcagtcgcatttttcattgctgtcattctcgcagcgtgttcacttgctttactgtcaagaagcgcgccgtaaattaagctttccgcatattgaggaagcagcacttcgagcacctcttcttcatccggttcgaactcgtaagaagccgtgcgcttcccgctgctcgttccgaaatccgttaaaggcagcacttttttctccgtcacttcctgtgaaatcgcactgacgaaatggttatacaccaaatgcagttcatcaaaagcgccgtcgataaacatttgaaccgtctgacgggtcaaatctttaatctgagcaaaagtgacctcgtcgccaagccccactaactcagacaaaatcggcatttcccgttttttgaagaaatcgcggccgactctgccgattgcaatcaccgtgtattcatctttagactgatggcgttcttgaatggtgcggtaagcgtttcgcaaaaccgaactgttaaacgcacccgcaagcccgcggtcagacgtaatgacgagatacgccgtctttttcacttctcttgagacaagcatcgggtgtttcgcgtttttcgcgccttttccgacgttaaacacaacctcctggatcttatccatatacggagcaaatgacttcgcgttggtttccgcacggttcagcttcgcagcggataccatctgcatggcttttgtaatctggcttgtttttttcgttgacgtgatccttgacttaatatcgcgtaatgaggccaaagatttcaccacctttattcttcatttgcgtaaaaagagagaaaaagagaacctttttctctcatcttctaagggttagttgcttggtgcaaatgtgcgtttgaagccttcgattgcagctttgaagtcttcatcagcaggaaggtttcctgttttcgcaatgccgtcaagcagatctttatggttttgatcaaggtacatgtagtactcttcttcaaaacgtctgatatccgcaaccggaatatcatcaagatatccttttgtcagcgcataaagaatggctacctgtttttcaaccgggagcggtttattcaagtcttgtttcagcacttcaactgtacgcgcaccgcggttcagtttcgcctgagtcgcctggtcaagatcagatccgaattgggcgaacgcttcaagttcacggtatgaagccaggtcaagacgcaaagttcccgctacctttttcatcgctttgatttgggctgatccgccgacacgggatacggataatccggcattgatcgcaggacgcacgcctgagaagaataggtcggattgaaggaaaatctgtccgtcagtaatggaaatgacgtttgtcgggatataagcggagatatctcctgcttgtgtttcgacgaacggcagcgccgtaattgatcctgcgccttttgcgtcactcagcttagctgcgcgctcaagcagacgggagtgaagatagaatacatccccagggaatgcttcacggcccggcggacggcgaagaagcaatgacagctcacggtaagcggccgcttgtttggataaatcatcatatacgacgagaacgtgcttgccgttgtacatgaattcttcacccattgtcacccctgcatacggtgcaaggtacagaagcggagccggctgtgaagcggacgctgtcacgacaatcgtgtaatcaagcgcgccatgcttacgaagtgtttccaccacgccgcgcactgtagattctttttgaccgatcgctacgtacacacagatcatgtcttgatctttttggtttaagattgtatcaatcgcaacagatgttttacctgtctgacggtcaccgataatcagctcacgctgtccgcggccgatcggaattaacgcgtcgatcgctttgatacccgtttgcagcggctcatgtaccgatttacggtccattacgcctggagcctggctttcgatcggacgtgttttgcttgtcagaatcggacccagtccgtctaccggctgtccgagcgggttgacgatacgtccgattaattctacacctacaggaacttccatgatgcggcccgttcttttgacctcatcaccttcacggatatctctgtaaggtcctaagataacgatacctacgttggattcttcaaggttttgagccatacccaaaacgccgtttgaaaactcaacaagttcaccggccatacaattgtcaaggccgtgcacacgcgcaataccgtctccgacttggatgactgtacctacgtcatgaacttcaatttcagattggtaattttgaatttgctgctttatcagcgtgctaatctcttcagctttgatgctcacttaggtttcaccccttctatcgatttcctccggcaagttgacgttccatgcgctcaagctttccgcttacgcttccgtcatatatccggtttccaatgcggactttaatgccgcctattaaatccgtctgcacttcatttctgattctgagcgaagcgattccggctttttttgcaaacacttgagacaatgataacatttccgcttctgacagcggttttactgaataaacaaccgcgtcctctgtctgacgggcctgattggcaagtttgataaactcgtctgtgagatcaggcacaatcgaagaccggcggcggtcaatcagaagaaaaatcgtatgcagcacagactcagacagtgcgccgaacgattgctgaatcagctcttttttcttagcggccgataccttcggatggcttaacacttcctgtaatccggcttcgttccggaacacttcttttagtacggtaagctcttcttcgatttcattgatttgagaagtctcaacggcaatgtcgaaaagcgctgacgcgtatcgtttagagacagcagatccactcatcggctttctcctacctctttaagatagtcctgaatcagttgttcctgggcttgttcatcaagctctttttcaatcactttcgatgcgattaagacagaaagtgatgcgacttgctcgcgaagtgcggaaaccgcttgttctttttctttaacaatttcggttctcgccgcttctttcaatctttcagactcggcgcgtgcagcctggataatgtcttccttctgcttttcacccagttttttcgcattttcaatgagtgattgtgattcctgtttcgcttcttttaaaagaacgcgctgctcttcaatcagcttctgcgcttctttatttctttcttcagcggacgtaatttcgccggcgatatgatcttcacgctgtttcattatatttaatagcggtccaagagcgaatttcttgagaagcgctaataaaactaacatagctaacaattggaataggatatctccgccgttaaacgacagtcctaattcaagaggtaattgagacatctactacggcaactcccttctgcaggttttctctgctgataaaaagccgtttcgggacggcctgcttatcagacataaagcaatggcgaaggttctcttagagtgatcttcgccatttttagttcatataaggcttttttgcttagccaaagaacgctaagaacgcgataacgacagcgataatcggaagggcctcaaccaatgcgatacccatgaacataagagttctaagttcttttcctgcttccggctgacgggcgattccctctaccgtacgtgaaacgatcagaccgttaccaatacctgcaccaagtgcacctaaaccgattgcaattgcagctgctattaaattcatgaaaaagttcctcctttaaaatgttatccgaatggatatatgattttaatgatcatgactgattttgtgtgacatgtacaccatcgtcagcatcgtaaagataaatgcctggatggtaccgatgaacaagctgaacgcctgccatgcaagcatcggaagaatggctccgactgtgccgaccaaaccgagaaagaagctgtttgagtagaaattcgtcgccagattcgcaagcaggccaagaagaatttccccggcgaaaatgttaccgtaaagacgaagtccgagtgtcagcgtattcgcaaactcctcaatgatcttcatcgggaacataagcggaaccggtctgaggtaatccttagagtattccttcaaacctttcatcttcacgccgtaatagtgcgttaacgacacaaccataacggctagagtcagagtaatagccggatcggccgtcggtgatttccaccaaagctcgtgtccgaccgttacagaaaacggcagccccagcatatttgatacaaatatgtacatcagcaaggttacaccaagcgccaagaagttagcccctgtttttaaatccattgtactgcctataatattgcggacaaaatcaacaatccattccatgaagttctgggcttttcctggacggatggacagcgttctcgtagtgagaatcgcaatcagcagcacaatcacacttgccacagtaatcatcagaatgtttgtcagattaaaagtaagaccaaacaaatccatagttctgtaatcgtgattcaatgggttttcacctctcttccattgatgaacgtttgagctgaataatggaatctatcataatgacgggataaattgtcattaatccaataatcacacttgccacactgactttatcgggatatttaaaggcgacagccatcgcaagtatcgcattgcaccaacgcgctgcgctcccgagtgatcgtatggactttcctttcgccacggccttgtcaaaagcattcattcttctggtcaagagccacaaattaaacaaactgaaaacagttcccaaaaagaggcctagaaaaacagttttatacgccgtaagaccatatcccagcaaatagattgctaagatcacaaatacatatctccgttgtctgctgaatgtaagattgggatcgtccatcaactatctgtctcctgatgaaaatgtaatataattcctggatacggcaaaacatgcggttaacccttgcagaaggccttttttgtccgcaaaacggcctgttcgaaaaaaccactcatcctcctgatgccacgggatgctgtttcattcgcttagataaatcctcatataacgggtttttttggaggatttaaaatgaggatggatactagaaatgaaaggaatgaaaaccttctcataataccctcgtttagcatacaatagcccctaacatgtgtcaatctgtttaaagttaaaaaactttttataccgaaagcatacacagaatgttcacaatttcacctataaatgtatgaactctgcccattcagcaaatatctggataaaaaaagaaaacccctgaatgaggttttccgatttatttggttccgtacagtctgtcacccgcgtcaccgaggcccggaacgatatagcctttttcattcagtttttcatcaagggcggcgatgtaaatatcaacgtcagaatggtgtttctgcagctcttccacgccttccggagccgctacaagacacataaaacgaatgtttctcgcgccgcgctttttcaggctgtttatcgcttccaccgcagagcctcccgtagcaagcatcggatccacgacaataaattcgcgttcttctacatcagaaggaagcttgacatagtattccaccggttttaaggtttccggatcacggtataatccgacatgtcccactttagcggccgggattaatttcagcatgccgtcaaccattccgagacccgctctcaggatcggcacgataccgagtttcttccctgaaatcactttggatgtcgctgtttgaacaggtgttttcacttccacttctttaagaggaagatcacgtgtaatttcaaacgccatcagtgatgcgacttcgtccacaaggtctctgaaatcctttgtgcctgtattttcattccgaatatatgtcagcttatgctggattaaaggatgatcaaatacgtaaacctttcccatactgtgttcagctccttttttgttgtccgagtgactttttcacacttctattgattctacagaaaaagacaaacagtttcaagaaaatcataaaaaaacccgccggattaaggttccggcgggtttcttccttattaatagtccagttctttatataaaggaaacttttcagtcaaggcagatacgcgctgtctcgcttcttcaagttttgcttcgtcttcatgatgtttcagcgcgaggccgatgatggcgccgacttcttcaagcgcgtcaccgtcaaagccgcggcttgtcacagctgccgtaccgaggcggattccgcttgtgacgaacggtttttccggatcgtaagggatcgcgtttttattagatgtaatgccgatttcatcaagaacgtgttcagcgacttttccggtcagaccgagagaacggaggtcgacaagcacaaggtggttatccgttccgcctgatacgagctgaatgccctctttgttcagagactcagccaggcgcttcgcgttcgagatgacgttttgcgcatatgttttgaaatcatcttcaagcacttctccgaaagaaacggctttggccgcgatgacatgcataagcggtccgccttggattcccgggaaaatggatttatcaatctttttgccaaactcttcacggcaaaggatcattcctccgcggggtccgcgaagtgttttgtgagtcgttgtcgttacaaagtcagcgtaaggaaccggattcggatgaagaccggctgcgacaagacccgcgatatgcgccatgtctaccatgaagtaagcgccgacttcatcagcgatttcgcggaattttataaagtcgatcgtgcgggggtacgcgctcgctccggcaacgatgagtttcggcttatgcgccagcgctttttcacgcacatcttcataatctatatattgcgtgtctttatcgacaccgtattctacaaagttgtattgaacgccgctgaaattaaccgggcttccgtgtgttaagtggccgccgtgggagaggttcatcccgagcaccgtgtcgccgtgctctaaaatcgtgaagtaaacagccatgttcgcttgagcgcctgagtgcggctgaacgtttacatgctcagctccgaaaatctctttcgcgcggtcgcgggcgatgtcctcaacgacatcaacatgctcacagccgccgtagtagcgtttgccggggtagccttcagcatatttgtttgttaaaacagagccttgtgcttccattaccgcttccgtcacgaagttttcagaagcaattaattcgatcttagtctgttgacgcttacgctcatctttgatggcgttaaacacttgtttgtcttgtacaggtaaatgtttcatcagcgagatcctctcctatccgtttcctgttctttatttttaccacccttattgtacatggtttttcaggtgaatgtaacagcttatttaaaaaaatcacaaaatttaattagaaaacacgaacattatacaggaaaagcattttcatcattcgcattcataaacggcgcgaattccgcctatcagcttcggccttgtccgggccatcgtcacatgtgcttctccaagctcacggcttgatatccggacagggacggcaacgggtttcagatgcatgccgatgaacgtatcgccgatgtcgatcccggcgtcagcctgaatcgattcggcgagcacgggagaacgcatctgccggtatgcataagaggccattgctccgcccgctttcgggacggggacggctgaaacaatggggagcctgaaccgctcggccgtttctgcttcaatgacaagcgccctgtttaaatgctcgcagcattgaaaagcaagatgcacacccgttttttccttaaaccggttaagtccgccgtatatcaattcagcccaatccccgcttccggcggtgccgatccggcttccggcggcttcacttgtactgcacccgatcaccagcagactgccgtccgtcagtcctgcctgctcttgaaactcagtcagcatgtccgtccatttttgcttcatctcttccattgtccagcacctcttacagatttttttcttcgtaatctgcgattttgccgatccgccgttcgtggcggccgcccgtaaattcagtcgtcagccagacttttgcgatttcgcgcgccagccccgggccgatgacgcgttcgcccatcgcaagaacattcgtgtcattgtgttcacgcgtcgcttttgcgctgaaggtgtcatgggcaagcgcacagcgtattccctttaccttatttgcggagatgctcatgccgatgcctgtgccgcaaattaaaattcccctgtcagcttcgccgttcaccactttttccgctaccggaaaagcgtagtctgaataatcgacagagccggcgccgcattcacagcccatatcaatgtattcaatctgcaattcatccaaaagactttttatttcttcgcggatatggacgccgccgtgatctgacgcaatagctactttcattcatttacctcctaggtgtggctgggcgaagacagcccagtgtgcttgtcctttttattacgaaatccgttgatttcattctactctttcacattcgttttgcaaatgacctgtttgcagattttctgacagattacttgctttttccgtcaagcaattgatcagccaaaagggtcagcagctcctccagttcgtcccgcgtttgtttataaacatcaagcggaccgccgaacgggtcagagatatcgccgttttctcccgttacgtattctttaatggtaaagactttgccctgactgttttgatatcggccttcaatcagctgtttgtgctgttccgtcatcgccagcaccagatcagccgtctcgatatgttcttccgataagggagatgaactgtgattgagagcgatccgtttttcaaacagcgcttctacggcatgggctgacgcttttccgttcggagacgcgaatacgccggccgaacttacgctgacgtccagccctttcgtttctgcaatggatttaaaaagagcctcagccatgggactgcggcacgtattgcctgtacaaacaaagattattttcatgtccgtcacctcttactgcctattataaatgaagaaaaaagaaacggcatcttcgtttctttttttacgtatcttataccggtaaaagcagtttcagcccgaatccgatcaaaatggctccgccaagcgcttcgctgtacgagccgagccacgactgcacctttcttcccgccaaaaggcccgcccatgttaaaacggtgctgaaaaccccgaacagcgtaacggccagaaacggattggaaccgttcatcccgagactgagcccgacagaaaagctgtccagactgacaccgaccgcaaacagcaacagtcccgagcctgccggagatatgagcggcccgtctgattgtttaaacgcggcgatgatcatctgcacccctaaaatgaaaagaagagatccgccgatgtaaacggcgagcatccccagaaaaccggacagcagatgcccggccgccattcccgcaagcggcatcatgacatgaaacagcccgatgacaacccctatatgaaaaatctgttttttcttcagctgaatcattcccattccgagcccgacggaaaaggcatccgtccccaaagcaaatgccatgatgcttaaggagacaagttccccgatgaatagattcgacatgaaataaaaacccccttggacgtgcccgcttgtttagcttatgcatgtccgataaggggtagaacaagttaatggataacggtgccgcctgcggctttcatcagcctgttcataatggcaagccccactccggtatccggaaaggactcagaaataatcatgtccacttccgcttcatcaaagctgcggagcgcatcgtataaggcggacgccactgtttcaaggtcggcgcgtctgccgcagaccttgatataatcagcctggtaactatcggcgttctcttctgttgtcagaatgccgattcgtttcccccggcttttatatgcgtctgccagttcttgaattctccgggcgccgccgtcggcaatagccatcggcgcagaaggcgcgtaatgtgtatatttcataccgggagaaataggaacctcatcttcttcggtcagccctttatccacaagaaccggaccggcggcggattcaatctgctcttttgtcacgccgcccggacgaagcagcacgggctgtttccccgtacaggacagaacggttgattccactccgattcccgtcgcgccgccgtccacaataccggcaatgcggccgtttaaatcatgggctacatgctcggccttcgtcgggctcggttttcctgataaattggcgctcggcgcggcgatcggcagtccggccgagctgatgagggctaatgctaccggatgatcaggcattctgaccgctaccgtctcaagtcccgcggtgacacggggtgacagcacaccgggcttacacggcagaacaagggtcagcgcccccggccagaatagcttcataagctttttcgccgtctcaggaatatggctgataaaacgatcaagctggctgatatgggatatatgcacaatcagcgggttatcgctcggccttccttttgcctcatatattttcgttacggcttccgtattttcagcgttagcgcccagtccgtaaacggtttctgtcggaaaagccacaacctcattctgccgcagcaattccgcggcttgtgtaatctggggatcggttgtggataattctgcggaacaatccacaaaccatcttcttgttttcatgtataaccaaactccttattttaaagcggtaaaactttattttctctcgtgtattccttttgaaagtataaaagatgtcctttaataaaacaagtgttatccacaaactgtggacaacactttttaataagtggataaccttgtgtataagttagatcaggcagaggttttcaccattaaaaacgaaccttctgtgcataacgagttgcggaaatgttcggacgtatacagttcatcaggcgcatcggcgcacgcttcaaatcccatcacattcagaaactcagcagatgagggctgattggcgactaagtagacatcttgaatctcatgttttttgcacagcacatccatactttgaaacagtgtaacgatatggctttgattcagcctgtccgacatgacgagtgaacggagaagcccttttccgccgctgaatttttcgatcccgagacaggcggcaatcattttttcgctgtcttccagtacgataaaccggctgatctgctgatcgatttccgcatgtgccgtatcagcctttttcaaaaaggcctccagtgcctccgtatcttgatctcttgccactctcagctgataaaacatatatttccctccgtttcgatcaactctttcttccaatctatgaatcgaatccggatttatgccttttacttcaggaaaatagatctgaaatccaatcgacgaggaaaaacttcacttcggtatcatcgtcatctttattttctttcttcgctttatcagcctttgcttttacgtcatccagcacttttttagtctgtttctgcgtttcttcctgcttctgtccgccctcttcctgatctttcaccgcttcgccgtttgagaaatcaaggaagcacagcggcggaaacaagacgcaccaccagttggcgccctcgccattgccgagtgtaattaaaatcgcttcatattttccggccggatagaccatattgccgtagagctttgtcggaaacgagattttattgaattgaactgaaacggattgatgcgcacccttttctttcatcgtttgtttggcgatttctttaatttcaggaagcttcgaacgaatgagccgccgcgcttcttcaatggaagtgatatctttcacccagtccgtgatttgcttgtttacagcatctctgatctggcgcttgagcttttgatcctcatcgttatcactgttggccaaaattctgagtcggatcgcttcatccggtatgacgacgggctcatcggctgatgcccgcgccgtttcttcttttgtcaaacccgcaagcgctcctgataataaaagaaaaatatatatgcagatcatcattgtctgtttcatcggtccccaccgttcctctccgtgctttttttatctagtcccattatggacatgacggaaaaggtttaaaccggcgggaagaaaaaaatctagcaagctgataatctgcattgacagattcaaaatatggtacgatattattttgataggaggttttcagatgaaatataattacaccgtgctgctgtcggcggcatgtatgtctgtcatttattctattttgtatgttcatcaattcattatcgcggctttcatttcgatggcgttttattttttgtttccttatttgatttttgcactgccgcttcaatactttctgaataaaaagccgaagagatttcatccgctgtatcttctttattatttaggggtgtcattcattgcaaacgggatcatcttcggtcttttgcagccgtcaggccaatctctgttttctaattcagccttttatatctttgcggttttaacagccgtcgtctattgggtatgggattccgtattgctgcaaagacaaaatccggctacagaagcgtaatcagcagacagccggctgaagggagagcggcgcaaaagaaaacggcggccatctttaaacgggcgtgccgtccttcttctgtttcagaatgataattggcccgctgctccgctccgcttacggccaacccggaaacgatgatcgctgtgacgataagaacagccgtaacggcgtcgaaaatgatgtcaacgccaaacggcagaacaacccccgccgcataagctgcggcggcgagtatacatccgaaggcgaacgcttttttcaaggcggatgcccctttcattttctttccattgtaacaaaagcccgccgtgtgcgtcaccggcgggcttttttcatgatgtgatgaccgcggatacggttctgtcttttccgttgatgtcctgtacgacttccacttccgcattcggaaaggaatgacggaacaggtctttcacggctttcccctgattatatccgatttcaaagacgacaagcgctttatctttcatgacaagaggcagctcctccataaaccgcttgtagaatttcaaaccgtcaccgccgtccgtaagagcatgaagcggctcatggaaacggacgatatccgacaaatcggccatttcttcttcagaaatatacggcggattggaaacaataatatccgcttttttccctgatgaaataaaaggagttaacagatctccctgcaaaaaacagacgtccgctccgaggttttgcgcatttctttccgccacctgcagcgcttcttttgaaatatccgaagccgatactgaaaaatgtccgcattcaagggcgagcgtcaccgcaatggcaccgctccccgtaccgatatcaatgacgttcagtcgttctgcctcggaaaatgcccgcttctgtctgtccagcagatgaaagacgacttcttccgtttccggacgcggaatgagaacatcgtcattcacaaaaaattccctgccgtaaaactgttctttcccgataatatattgaatcggaataccttctttatgcatctccacgtgccgtctgaatcgataaagctcgtcctcgccgacgggctcctgcagacttgcgagaagcttgctccgatccattccggtatcatttaacagcagcagctcggccgcgtttttttctcttcccgcttcggttaaataagaagaagcccagcttagggcttcaaaaacggtcttcatcttaattttccgcctgctggagcttgcttgactggtcttctacgattaacgcttcaactacttcatcaagcttgccttccaggatttgatccagcttttgaatcgtcaggccgatgcggtgatccgtcacacggttttgcgggaaattgtatgtgcggatacgctcggaacggtcgcctgaaccgacggctgatttacgggtctgatcatattcagcctgagcttcctgctggaatttgtcatagattctggcgcggagcaccttcatcgctttttctttgtttttaatctgagatttttcatcctgacaggaaacgacaacaccggtcggtaaatgcgtcaggcgtacggccgacatcgtcgtgtttacgctttgtccgcccggtccgcttgatgcgaatgtatcgacgcggatgtctttttcgtggatgtccacttctacttcttccgcttcaggaagacacgccaccgtcgccgtggatgtatgaatacggccgcctgattccgtttccggaacacgctgtacgcggtgcgcgccattttcatacttcagcttggagtatgcgccttttcccgtaatcataaagatgatttctttgtaaccgcccgttccggtcacgtttgcttccatgacttcagtcttccagccttggatttcggcataacgggagtacattctgtagagatttcccgcaaacagcgcggcttcttctcctcccgctgctccgcggatctccatgattacgtttttgtcatcgttcgggtctttcgggatgaggagtactttcaaacgctctgataaggtttccgtctctccctgcagttcggagatttcttccttcaccatttctctcatatcggcatcaagcttttcctcaagcatcgctttcgcatcggcaagctgttctgatgcgtctctgtattgtctatagacttcaacggtttcttgtatatcagattgctctttcgaatattctctaagctttttcggatcgttgaccacttccggatcacttaaaagctcatttaatttttcgtatcgttgttcaattgactgtaaacggtctaacacggtcttcacctctgttttcctgtgcgtaacattctcattatagtatagggcttatcgccagtcaaaagcaattcgcctctgttatactgaagcaaaaaaggaggggcggatatgctgaaatccatccaccatatagcaatcatatgctctgattatgaaaagtcgaaagctttttacaccgagattctcggtttcggcattataaaagaaacataccgaaaggaacgggaatcttataaacttgatcttgcgctggacggcgcgtacgcgattgaattgttttcctttcccgatccgcccgaacggccgaccagaccggaagccgcaggtctccggcatctcgccttcaccgtaaacgatcttgaagcagccgtcagggagctaaaggaaaagggcgtcggcacagaaccgatcagaaccgatccgctgacggggaaacggtttacctttttctttgatcccgacaagcttccgcttgaattgtatgaagcgtaacgttttttgaagaaatgccgctttctttggcgaattccttcttgttttgtctaacatgaagggaacgccgcctcatggtcgaatacctagcaaaaaggaggtatgtgatcatgaatacaaacatggccgcgaaagagctcggcgtctccgcaaaaacggtgcaaaggtgggtcaagcagctgaatcttccggctgaacggaatgagctcggacattattcctttacacctgaggatcttgatgtgctgaaatcggtcaaacggcaaatttctgaaggcactgcccttctggacgttcaagtgccccggcagccgaaaaaacggacgggcttcattttgcagcgtccgaaaatcaatggcggcgctgaacaaaggttggcagagctggagcgcaaactggacattctcacgaaagagaaacaaggtgagagccatctgctttcaaggatagaggagcttgaacgccagctgaaacaaaaggcggatgaaggggtgtcttatcagcttcttcagcacaggcgggaaattgacgacctcaataccgaattgcagacattggcctcccgcatccaggaacttgcccagacagctcccctctcagaaacagccgcttcttcagaacataagaaacccagaaaaaaaacgagattttcgccttttaaatttcaattctaatcaaaaaagctccctgaaacagggagcttttcattatgcagtcagcgcaatgatgatcggcagtgagatgagagataaaatcgcactgatcacgaacgcggacgcagtttcttcctcttgtttttcgaaacgtgtggcaatcatcgccgctaccgcagatccagggaatgcaacgagcaataccgctttagtgatctggtcagccggaagtccgactgcaagagcgatcaagtacatcagcgcaggctgaacggcaacttttaacaaagcgataccgaaagccggcagactgagcttaatgttgcggataccgacagttacaccgacggcgaagagcgcaacacctgatgttgtgcttccgagctgatcaagcattttttctcccaagccagggagtgttacaccgcagagtaccagaatgatactgataagcggtgcagccgcaagcggttcggaaagaccgtgaagaatagacttaccagtcattttccagaagttctcgttttcagtgtcttttttcttagatgactcaccgacagtagcgataatgatcgcaagcgggtcaagtatggcgttaaccacgatacccgtaacggcgataggaatcgctacttcgcttgctccgaataagcttcctagtacgggaatacccataaaagcaaatgtcggctgtgcagagtttaaagaaaatacagatgaattcgttaaatcatacttgaagataaatttgcaaaccaacagaatgacgataaagaatccgacaatcccaatgatcaaagcgaccatcaaaggaacctgtgataaaaacgcacttcttgaagtggttaaaatacttgcgataaaatgcgccggaagcgcgtacttcgtaactaaggtgcttaccccttttgctgacttcgcgtcataacttccgaagcgacctgcgaaccatcccagcacgatcacgaaaaagatcggcgccaggaggattaaaatatctaagaagctcaaaatattctcctccaaatccttaatgtccgtatactttagcctttacataaaagctttccctcggactgtaaaattaatcgtaaaaattatttagcgacaacttgtttatattgcggtttccacattgcatcaagaacggcttgttctacattttcaggaatgcggtttgccacgccttctttaatggcagtttccgctacggcgatcgcaactttaattgaaacttcttgtaagtcgctcatgctcggcagaaggcctgcacccggtgtttcaaaatcaacgctttctgcgattgcgtcagcagttgccgcaaacattgcaggagtaatcactttcgcttctacaacgattgaaccgagaccaagtccagggaacgcgaatgcgttgttagattgtccgatttcatgagaaacgccattgtactctacattgtcaaacgggcttcctgtcgccacaagcactttgccgtcagtccatttgaaaagatcgctaggaacggcttcagcaagcggtgtcgggttagacatcggcatgatgaccggacgctcaacgtgttttgccatttctttgacgatttcttcactgaacgcgccgctttggcctgatgtaccgattaagattgtcggtttcgcttgacggatcacttcaatgaaaggaatttgtccattttcatcgcgtttccaatctttaatttcttcagctgtgcgcaggtacggctcttggaaatcaagaatgttttccataccttcaattaacaagcctctgtagtccattgtgtagaacgctttgttggcttcttcttcagaaagaccggcaagcaccatagtgtcgcggatttggtcagcgattccgattccggcagatcccgcaccgaagacaaccacacgctggtctttaatagacgcgcctgttttcttcatagccgcaagcacacctgcaagcgtaatcgcgcctgttccttgaatgtcatcgttgaatgtaagaatttcatggttgtatttcttcatgatattgcgcgcgtttttgtttccaaggtcttcccagtgaagaagagctttagggaaatatttaagcgcagcttttacataagcgtcaacgaaagcttcgtaacgttcgccttggatacgttcatggcggttaccgatgtataaaggatcgttcagaagtttttcattgttcgtaccgacgtcaagaacgacaggaataacacggcttgggtcaataccggcggcagctgtgtataccgctaatttaccgatggcgatgttgataccgcctacaccccagtcaccgattccgaggatgctttctgagtctgtcgcaacgatcagatcaatatctccggcagtggcatgaaggttttcaaatgcctcttcaattccttccacgttatcgatagaaaggtaaatcccttgaggtcttctgtactcatggctgtattcttgaatcgcttcaccgacagtcggtgtgtaaacaaccggcagcatttcacgaagatggttttgaagcaatttaaagaaaagaacttcgttacggttttgcaaatcattcaaatatacgttttggcgaaggcggtccggctgagcttgaaactgctcgtatgcgcgttttgcctgctcatcaagagacagaattgtcggaggaagcagcccgtctaatccaaggctttttctttcttctgctgaaaacgcaacacctttatttaaagtagggatagatagaacttcttttcctcttaaagtagtttctaagttgccttccttcgttactttaatattattcaagaaaatctccttctttcttcaaatagttaacaaagttaagtaattacccattttggctagtgtgatcgcgatctgctatatctttttttgacaattattcgaacaatgtctcataactatttacattacttagtcattttatgcctgtaaaaatgaaaattcaagagatgaaaattacttaattttttcatactcttttttaagttatttaactacaatttttgaaaaaacgtcaaaaaaacaccggattttttaccgatgttttcatgaaaagggttatttatcagtctgtttttttcggcacttcgtgatgatgcctgcatctcgcttcgtatgactccgacgcgccgactaaaatgaccggatcatcataggaagcgggcttcccgtcaatcaaacgctgcgtacggcttgccggcgacccgcaaacggagcagaccgcctgcagcttcgtcaccgattcggcaaccgccatcagattcggcaccacgccgaaaggctctccccggaaatccatatcaagtccggccgcgatgacacgatagcctttatccgcaagcgaggataagtcgccgatgatcgattcgccgaaaaactgcacctcatctaccgcgatgacgtccgtgctttcactgatatgatcccatatttcagccgaagacgagatgacgtggcttgtcatggatgtgccgttgtgagaaacgacggcctcctcactgtagcgattatcaatggcaggtttgaataccttaacctcctgcttcgcatatgtcgctcttttcactctgcggatcagctcttctgatttcccagagaacatgctgccgcatatcagctcaagccatccgctttgcttcattatgtacataggctatccgctcccctttttttcctgtttatgggcataaaaaacaggcaagaagcaattcttgcctgcctgtaaaatctattattacttaagaccgtattttttgttaaagcgatcaacacgaccatcagcagaagcgaatttttgacgtccagtgtagaatgggtggcattcagagcaaatctcaacgcgtacctcttcttttactgagcctgtttcaaattcatttccgcaagcgcatttaactgttgcttttttgaaattaggatgaattcctgctttcattgtatccatctccttccgccctgaatcccgtgtggaaacagagttattattccggagtaatccggaacgcatatgagagaattatatcagtcatttactgcatttgcaaatacattttttatcagcggcgggctgatgatgaaaggtttgcctgcttccattcttggttgatcagatcgaagaattcctgattcgtttttgtttttttcatttttctcataaacttctctgcgaagtccggagaatcagacatcgatttgcggatcgcccatagacggtcaagatgctctttcggcacgagcagctcttccttccgtgtgccggagcggcggatatcgatcgccgggaaaatccgtctttccgcaagagaacggtcaaggtgaagctccatgttgcccgttcctttaaactcttcatagatgacgtcatccatccgggagcccgtgtctacgagcgccgtcgccaaaatggtcaggctgccgccctcttcaatgtttctcgcggcaccgaaaaagcgcttcggacgatggaacgcagccgggtcaatcccgccggaaagcgtacgtccgcttggcgggataacgaggttgtaggcccgtgccaggcgggtaatgctgtccatcagaatgataacgtcttttttatgttcaacgagacgcatcgcccgttcaagcacaagctccgctaccttaatgtgattttccggcacctcatcgaacgtcgagctgacgacatcgcccgctacggaacgttcaatatccgttacttcttccggtctttcatcaattaagagaacaatcaattcagcgtcaggctgatttgtcgtaatgctgttagcgatttctttcaacagcatggttttaccggctttcggcggcgctacgatcagaccgcgctggccgaaaccgacgggagccatcatatcgagaattcttgttgagagataattcggtttcgtctcaagcaccatttggcggtccggataaagcggagtcagcgcaggaaaatggacgcgctctttcgcagattccggatcatctccatttaccgcttcaacgtgcaaaagtccgtaatagcgttcgttttctttcggcggacgcaccttgccggatactttgtcaccgtttcttaaatcaaagcggcggatctgggaagcagaaatgtagatgtcttctgagcttggcgagtaattaatcggtctgaggaagccgaatccttccgattggatgatttcgagcacgccttccataaacagaagatcctcctgctcggcgttggctttcagaatggcaaagattaattcttttttagtcagtttgctgtagtaggagattttataatgtctggccagttcatatagttcttttaatttcatattttccaaagaggaaatagatacgtctttcataaaaacaccacgcttttcatagtcaatgtattgctgttttcattcaaatcggctgcttcgcatgattccgccaaagcacattcttttataaaacgttcaggaacttctatcggtaacacttccacccatgatcggcgcttttttaaaaaaggaatgtcttaatgagttttgaaggaagcgaggacaaaaacttgagaagatcaatatttatatcgtctgtatgcggtagaatttgaaaatttcccagtactcaaaagaaggaatgacacagaaaaatcgcagcactctttatttttacctcatttcaaaaaattattcaacttaaataatgctttgacatataaatgatagggttgactctttattgcaaaagaaaagcgggactttccgtcccgcttttatctatttatggccggatcacaagatttggttttttcttcaggctgtgtcttccgtcaacgaatcggaccgttcctgatttcgcccggatgaccagactttcagtcgtgccgacggagcctttgaactgaacgcctttcagcagctctccgtccgtgacgcccgttgcggcaaaaatggcgtcatcccctctcacaaggtcctccatccggagcactttggatacatcaaggcccattcgctcacagcgggcctgctcttccgcactttgcggcagaagcctgccgatgatttcgccgccgagcgcttttaacgcaacggcagacagcacgccttcaggagccccgcctgaaccgaagagaatgtctactcccgtatggtcaaaggccgtattgatggcgcccgcgacatcaccgtcgttgatcagtttgattctggcgcccgcctcacgcaattcagagatgattttttcatgtctgtcacgatttaaaatggttgccacgacatcttcaatgtctttgtttttcgctttcgcaacggcttttaagttatcaatgacaggcgcttcaatatcgatgcagcctaccgcttcgggaccgaccgcgattttttccatatacatatccggggcgttcagcagtgttccatggtcggcgaccgcgatcaccgtcagcgcattccagccgccgctcgctacgatgtttgtgccttcaagaggatcgacggcgacatcgacgcgcgggccgtatccgtttcccagcttttcaccgatgtaaagcatcggcgcttcatccatctcgccttccccgatcacgaccgtgcctttcatcggcaccgtgtcaaacacgtcacgcattgcgcttgtcgccgcatcatcagcttcatcttttttcccgcggcccatccatctggcagatgctaaagccgccgcttcagtgactcgaaccaattccatcgataagcttctttccatttcaacacgatctcctctcaaaagtccgcatttctatgaattttggagctgttctatctcttcgtccgtcagcctttgccgccagattgtggcgcccagaccttcgagttttttctcaagattgctgtagccgcggtctaaatgctcaagaccggtaatttcggttacgccgtcagccatgagcccggcgacgaccagacaagcacctgcacgcagatcgctcgcctttacttttgcgccctgaagctcggccggacctgtgataatggccgacctgccttccactttcatgttggcccccatccgtctcagctcatctatatgtttaaatcgggccgagtagatggtgtcggttacgacgctcgtaccgctggctctcgttaacagagatgtcatcggctgctgaagatcagtcgggaatcccgggtaaacaagcgtttttacgtcgaccggttttatctgcttctgcccgccgagcataagaagctgatcgtcactcgtctcaatgtgaaaacccatttccctgagcttcgccgttaaagactccaggtgagtcggtatgacattatcaataatgacttctttccccatcgcggcgccggcgatcataaaggtgcccgcctcaattctgtccggaatgatcgtatgcctgcatccatgcagctcttttacgccgtcgattctgattacattggttcccgcgcctttgatctttgcgcccatgctggtgagcaatgtggcaacatcaataatctcaggttccttggcggcgttttctatcacggttttaccttcagccagtacagcggcaagcatgatattgatcgtcgctccgacgctgacgacatctaaataaatccgtgcgcctctcagcctttcggcgcgcagataaatcgcgccttgttcattggtgacttccgccccaagcgcttcaaaccctttgatgtgctggtcaatcggccgcggcccgagatggcatccgcccggcagtccgatgaccgcctgtttgaagcggcccagcatcgcgcccattaagtaataggaagcgcggagttttttcactttgccgttgggaagcggcatgctgatcatcggggaagggtcgacgaccatttctcctttttcaaaatggacgtttccgccgatttctttcagcaggtcacgcagcgtttcaatatctgagatctccggaagcccttcgatcgttacttcggaatttgccagaatggttgcgggtatcaatgcgacggcgctgtttttcgcgccgctgatatgtacggttccgtttaacggatcgccgccggcaatattcaacttttccatgatagtctccttccataagaagatagctgcggagcgtaaataaaatggcattttattctgtctctgcaaataaagctcttgtccaaaatgtagccaattcgaagagaaagaatacaaggacattataaaataacaggaagaaaatagcgaagctttgcggggcatttttaacacaggatgcacagaggcccgccgggttcacattccggggaaacacactcttcactttgatacttaaggcccgctgccaaacaggaaaacataagggtgcggcaaacggatgcaaccggtttgccgcccttttcacccttatttattccagtctgccaagaattgctcgatgcctttatccgttaacggatgtttcgccagctggtgaatgactttcagcggcatcgtaccgatatgcgcaccgcgtaaagcggcttcagtcacgtgctgcgcatgacggatggaagctgcgatgatttgtgtatcaatgtcatgaatgtcaaaaatctgtcttatttctgaaatcagttcaagaccgttatggccgatgtcatccagacggcctaagaacggagatacataagtcgccccggctcttgccgccaaaagcgcctggttggcactgaagatgagcgttacgtttgttttaatgttcaggtcgctcagcgcttttacggcttttaacccttcagacgtcatcggtattttcaccgtgatattcggtgcgattttcgcaagttctttaccttcttcaatcatttcttcagcattcagggaaatgacttccgcgcttactgatccgctcacgacttccgtaatctcacgaagtctgtcatggaaagacacgtcagcttctttcgccactaaactagggtttgtcgtaactccggcaagaacgccaagttcataagcttctttaatctcgtcaatgtttgctgtatcaatgaaaaataacataaggaaagcctccccagtaataaattttcagaactgtaaaacatgattgcgctttctaaaggtaagacataaaaccgcctgtcaatgctgtcaggcggtttatggatgttacattggattaagcttggtttgaagaaccgaactcacgcattttgccgataaccgtttctttgatcgcttcacgagcaggtccaagatatttacgaggatcgtattcgttcggcttagctgccaatgtttcgcggacagcttttgcagaagaaatttggttttcagtgtttacgttgattttagccgtaccaagtgagattgattttttaatgtcggcagtcggaattcctgtaccgccgtgaagtactaacggaaggccggttgatttgccgatatcttccatttctttgaaaccgaggttcggttcgcctttgtaagggccgtgaacagaacccagtgcaggtgcaaggcagtcgatgccagtgcgctctacaagttcttgacactctttagggtcagcatagattacgccttcagcgatcacgtcatcttcctgtccgcctacagttccaagctcagcttcaactgaaacgccgtggaaatgagcaagctcaaccactttagctgtagttgctacgttttcctcaaacgggtggtgagatgcgtcgatcattacagaagtgaagcctgcatgaatcgctttcgcacaagattcaaagcttgaaccgtggtctaagtgaatggcgacaggaactgtcactttgtattcttccataagagctttaaccatggcaaccactgttttgaagccgcccatgtagcgtcccgcgccttctgaaacaccaagaataaccggggatttttcctcttctgctgcttgtaaaatagcttgagtgaactcaaggttatttaagttaaattgtccaacagcatatcctttttctttagctgtattcaacatttccgtcattgaaactaaaggcatgtcgaaagtcctccttatgtagcctgatttgcttcttctcgaaaaaagctttccaactatagcatgaccataaaaacctgtcatatgtaaaacaacagatcgctttttctccatctctaggataccaacttttcgacaaatcggcaacacaatgacataattgtttctaattttattaattcgattttagaggtaaatattttttcaccgcgtctctgatctcatcaatgtcaaaaggtttcgcaaaatgagtcagcgctccgagctcttttgattccttaatcatatcgagttctccgtaagcggtcatgataatgacgcggatagattcgtcgatcatcttcatgcgcttgagaatttcgattccgtccatgccggggattttcatatctaaaagcacgagatcgggccgttctttcgttacgatgtccagcgcctgtatgccgttggcggcctgaaacgtctggtacccttctttatgaaacacttcattgagcaatatgcgtataccgtattggtcatctacgattaaaatcttttcattcatcattttacaccccaatattatcattttcgtcaaaaggaagcagttgtttatgtattctgtttgattttcacatttcctttaattataatagtctactttccgacattttctgagcattttctcttttgttgtatactgttcttgtatgtgtaaaggaggtttcactcatgttaaagatatttacaacgcagcttgcaggcattttttcccgcattcaggataaggaatccgaagcaatagaagacggcgcgcgcctgctggcgcaggcagccgtcagcggttataccatttatttatacggcgcaaatgagatgcagggcattttgtgcgaggcggaactcggctcagaaccgatgccttccgtcaaagcgtttccggatacagctgattcgattacagaaagcgacagggtgctgatgttttgttcaggtccgggcacggctgaagaacaggcgctggctcaaaagctttatgaaaaagggatcggcctcgttggcgtatctcctgtcatcaaagatcaaaccgggattgaggaattttgtgatgttcatattgacagcaaattaaaaatgccgcttctgcctgatgaagacgggacaagatacggctttccttcattaatgacaggcctgtatgtctatcacgcactgtcctttacgttaaaggaaatgatgcaggaatatgcctgatgcagaaaaaagacttgccgcttttaaaggaggcaagtctttttttattacttctgttctgcagcttgtacggaagcgccgataaagtctttgaataaaggctgaggtcttgtcggtcttgatttgaactcagggtggaactggcaagcgacataccaaggatggtctttcagctcgatgatttccacaagacggccgtcagggcttgttcctgagaacacaaaaccgttctcttccatttgctgtctgtattcgttgttgaattcataacggtggcggtggcgttcgtataccacttcatccgcatacgcttcgaaggctttcgtgtcttcctgaagcttacaagggtacagtccgagacgaagcgttcctccaagatcctcgacatctttttgttccggcagaaggtcgatgatcggataaggagtggacggatcgatctccgcagagtgagccccttccagacctaatacgtttcgcgcatattcaatggatgcaatctgcataccgaggcagatgccgaagaacggaattttattctcacgcgcatacttggcggcgatgattttcccttctacaccgcggtctccgaaaccgccgggcacgatgattccgtctgtgccgctagtcagctcttgaatattgctttctgtcacttcttcggcgttaatccatttgatcttcacatcagcatcaaacgcatagccggcgtggcgcagtgattcaacgactgaaatgtaagcgtcctgaagctcgacgtatttaccgacgaggctgattgtaatggttttagacaagtttttcactttcgtgacaaggtctttccattccgtcatatccgggtctttgcattctaatttcatatgatcgcagacaagcttatcgagtccctgctcctgaaggttaagcgggatggagtaaaggttgtccgcatcttcgcactcgatgaccgctttcgtgtcaatatcgcagaagagcgcgattttatctttcatatcttgagaaatcggcatttccgtgcgcacgacgatgatattaggctgaataccgaggcttctcagctcttttacgctgtgctgcgtcggttttgttttcagctcgcccgccgctttgatgtacggaacaagcgtacagtgaatgtacatcacgttttcatggccgatgtcgcttttcatttgacggatggcttcaaggaacggaagggattcgatgtctcccactgttccgccgatctcagtaatgactacatctgcgtttgtttctttgcctgcacggtacacgcggtctttcagttcatttgtgatgtgcggaatgacctgaaccgttccgccgaggtagtccccgcggcgctcttttttcaatacggcagaatagattttaccggtcgtcacgttgctgaatctgttcagattaatgtcaatgaaccgctcataatgccctaagtcaagatcagtctcagcgccgtcatcggtaacgaatacctcaccgtgctggtacgggctcatcgttcccgggtcaacgttgatataagggtcaaatttttggatggtgacgctcatgcctctgtttttcaaaaggcggccaagtgacgcagccacaattccttttccgagtgatgatacaactcccccggttacaaaaatatatttcgtcatttcgtttgctcctctcttcggtctgcgctacattccttaaaatgtgccgttttatagaaaatcatttcactaaaaacaaatgatgtgtaaaagaatttgggagatgaaaataagaaagctccctttcaatttcttgaaagggagcgtagcactcttatgaattctcttctttttgaagagcccaaaatacatactacatagttcgacaatgaaagtcaagatcgttttgctgatataaaatcagtctttgcgatcctcttcctcatcatcataatcttcctcatcttcttcaaccatctcgtcttcgatctcaagctcgtcgtcatcttcttcatcgatatcttcgtcgtcaaagctgtctgcttcaaggtcaatatcttcttctatttcatcgagatcgatgtcatcttcgtcaacttcctcgaattcatcaaggtcgagatcttcctcaacgacttttttcgcttttttctttttcgcctttacagtcggctgtgtttcttcgtccagctgatcgtacggataccagctgcgaagcccccacgtctggtctgacagagcaataaagcggccgtcaatgttcaggtctgtataaaattgggcgatacggtcgcccagttcctctttcgtaacaccgagcaaggagatcatttcattcagcagctcctgaaacggaaccggttttttatgttctgagaaaatttcgtgagcgatttcaactaaagccatctgcttcagctgttcctgagaatattgtttgatactcaaggtcggacactccctttctattacttatatgtatctgtttctatcctataataagaacgaatttgtattgttttgttcataaaccatacctctcattataaacaaattaaaacagaatatgctacccttaacagcgtaatttaagaaattttagagccgtcccttcataaatcggctgatgtgcgaaaacaaagccgccggcatatgcgccggcggcccgcttctttctataaagactcttgtttttcggcgccgaatacagacatggcgagcaattcactgacatcataagtgccgatcgcgtcttcggcttctttcgctttcgtaccgtcaccgagcatggtcagacagtaaggacatccggagctgatgaccgtcggactgacagaaagcgcctgctcagtccgggccgtgttgattctcgctcccgtttcttcttccatccacatgagccctcccccggcgccgcagcacatcccgttttcgcggctgcgctccatttccttcaattgaacgcccggaatggcttttaagatcgctctcggcggctcatacacttcattgtatcttcctaaatagcacgagtcatggaaggtaatcgtttcattcaccgggtgaagcggttttagtttcccctgtgacacaagctcggctaataattcagtatgatgatagacttcggcccggaatccgaaatcaggatattcatttttgaacatattataggcgtgcggatcaatcgtgacgatttttttgatcccgtgtttttcaaattcgccgatgttgtgttccgccagctcttggaacagaaactcgttgcccaaacggcgcggcgtatcgcctgagtttttttccttattgccgagaatcgcaaaggatacgcccgcttcattaagcagctttgcaaatgagacggcaatcttttggctcctgttatcgtaggaacccattgagcctacccaaaacaagtagtcgaacgctttgtcttgttttttcatttctttcactgtcggaatctctgtatcagcctgctccctccagttctcccgctctttccggtttaagccccacgggtttccctgtctttcaatgcttgtcatggcccgctgcgcgtcgctgtccatcttcccttccgtaagcacaagatagcggcgcagatcgataattttatcaacgtgttcattcatgaccggacattgatcctcacagttgcggcaagtggtgcacgcccaaatctcctcttccgtgatgacctcgccgattaagctcgggttgtaatcaatggctgccgccgcttcacgcgatcctccccctgaggaagccgcggcgagctgattcgctttcgtgtgctgaaaaacgggcgcgggcacccacggagattttgacgtcacggcagcgcctttttccgtcaaatggtctctgagctttaaaatgaggtccatcggcgagagcatcttgcccgtaccggaggccggacacatatttgtacagcggccgcattcgacgcaggcgtaaaggtcgacaagctgagagcggcggaagtcttcaatctttccgacgccgtagctttctttcgtctcatcggtgaaatcgattttttccagctttccttttgaatccagcctgctgaggaacacattcgccggacccgcaattaagtgcgcatgctttgattgcggcacgtacactaaaaagctgagcaaaaacaaaagatgaagccaccatgaaacataaaacacggcggcggccgccggcgctgaaagaccgccgagcacaatcgcaatggaggaggcgatcggctccgtccaagacagagaatgatcgtgccataaaaggttcatggcgttcccgagaagcaccgtcaccatcagtccgccgataaacagcaggacaagccccgctttaaacccgcgtttcagtctgacgagtttttcaatgtagcgccggtaaaacgcccagactacggcgattaaaatcagaaacgtgacgatttcctgaaaaaaagtaaacgccggataaagcggaccgaacggcagatggcggtcaggaagcagccctttcagaataaaatcaattgcgccgaactgaacgagtataaaaccgtaaaaaaacagaacgtggatgatgccgctctttttatctttcagcaattttttctgtccgaatacattcacccatatcttctgaagacgttctttcaggcgtttatcaaattcttccctttggccgagcttaatataagcgatcctcgttctgatcaggtaaacgaataaataaacggcgtaagcggttacagctgaaaacagcagcgcgtttaccatgagaaatgcgttcatcttgtctccccctttgttctgatacccctcttcattgtcatatctttactttatcataaataatgaatgagtgttcagtcaataattaaattcacattctcagggcacactacgaatacttcggaaaggagcgtcggtatgaaggtcatttttgtgttgcttgtcatttttatcatattgatcgcacttatgctgcttgatatgctgcttggccgggcggcgtacaaaaaacaggcgtatgagcccgtttttgacccgaaaaagagtgatatcacactcattcactgcggcagcgagcttgtgcggcagatgacggctgatatccgccaagccgtctcttctattcatatgatgttttttattatgaagaacgatcaagtcagccatgagatgtttgatttattgaaggaaaaggcccaggccggcgtctccgtatatctgctgctcgactgggcgggcagccgccaagtgaaaaagccttccattcaaacgatgaaaaaagccggcgtccacgttcattttctaaataaaccggcatttccgtttctttttttcaggctgcaaaaacggaatcaccggaaagtgaccgtcattgacggcaaaatcggctatgtcggcggttttaatatcgctgaagagtacctcggcaaaaaagcgaagttcggaaactgggaggattatcacctgcggatgaccggcgaaggcacggcggatcttcagactctttttgtaagcgatctgaaacgaaacaccggaaaggcacccggatcacccggggtttatcccgcattatccgaagggaatatctctcataggacatatgcatctgacggtttttcgcttgaatcgcattatgaaaactgcatccgtaaggcggagaaaaaaatcattatcggcacgccttattatgtaccgagcaaaaagcttcaggaagcgcttatttcagcctgccgaaaaggcgtcaaagtcatcttgatcgtgccgatgaaatcagaccacccgctcgttcgggaaacagcttttacctattatcccgagcttctgaaggccggctgcctcatctatcggtattatcaaggcttttatcatgtcaaagctttcattattgatgaccgcatcagcattatcggcacgccgaattttgataaacggagcctgttctggaatgaagaggtgaatgtcatcattcatgatgaagcctttacaaaggaagtgctttcaaccataaagcaggacatcgaaaaatccgagcttctcacattagaaaaagtgaaacagcgctccgtcagacagcttcctgcagaatggctgggaaaggccatatcttactttttataaaggagaaaccatatgctgttcagattcggattcgtcgcaaacgccatgtgcctttgggacgcgtcacccgcaaaaaccttaacatatgcgcgctataccaagctttcccgcagtgagcggaaagaggccctgctttctgtgacgaaagccaatctcaccaatacgctgcgcaccatccactatgtgatcagccacggcatcccgctgtacaggttctcaagctcgattgtgccgctcgccacccatccggatgtgctgtgggattttgtcacgccgtttcgccaggagtttcgtgagatcggcgggctggtcagaaaatatgacctcagaacgagctttcatccgaaccaattcacgctttttacaagcccgaaacaggagattaccgcaaatgcggtcaaggatatggcctatcattatgacatgctggacgcaatggacatcgcggaccgttccgtcatcaacatccatgtcggaggcgcttacggtgacaaacaaagcgcgcttggccgtttccgcgtgaatctgaaagaacttcccgatgtcatcaaacagcggatgactttagaaaacgatgataaaacatatacgtccgaggaaacactcagtatatgtgagcaagaaggcattccgtttgtgtttgattatcaccatttttacgccaatccgaccgatgacgctgatttagatgacattcttccgcggatgatcaaaacatggcagcggatcggcttaaagccgaaggtccatctctcctcgccaaaatcagaatcagccgtacgcagtcatgcggactatgtagatgcgaattttattctgccggtgctggagcggttcagacaatgggatacggacatcgattttatgattgaggcgaaagagaaagaccgggcgctgctccggctcgtcgaagaattaagcgccatccgcggagtcaaacgcctggcgggcggagtgctgaagtggaaggcataaccaggtttatcacccgtttatatggggaatttccgaaataacagaccatcagacggaggagaaaacatatgaaaaacattacatctttgaaaatagttgctaagaagttcactttacgtaacatgcttcagctttatcagctttgccacacgggaggccacgagctgtatatctactctaaaaaaacgatgtgcaaaatcaaagatatcattgagctggaaacgttcagaatggcccataaagaacaagaatatttaattgtagtggaaggaaagaaagcggtgcagcttgttgaccgtttcaaacatatcatcgaacctgcgcaaaaagaagcccattaaatacggactacataaaaaaaggatagacaggaggctgcccggcccccgctcgtctatcctttttcttttattaatgaatcagctcgccgaattgggcctgatgaagtctctggtacatgccgccggatgccagcagttccttatgatgaccttgttcagcgatgccatctttcgtgacgacgacgatccggtccgcatccttaatcgtagccagccgatgggcgatcacaagcgttgtgcgtccttcagacagctcttgcagcgatttttgaatggcggcttccgtttctgtatcgagggctgatgtagcctcgtctaaaattaagatcgacgggtttttcaaaaacattctggcgatggaaagccgctgcttctgcccgcctgacagcttcacgccgcgctcgccgatcaccgtgtttaaaccgtcgggatacccgtttaccaagtcctctaaatgcgcctggcggacggcctgccagatttcttcctcagacgcgtcgagccgcccgtaagcaatgttttcccgcaatgtgccggaaaacagaaagacatcctgctggacgacgccgatttgtccgcgcaatgatgacagcgtcatgtccttaatatcgattccgtcgatggaaatcacgccttcagacggctcataaaagcgcggcagcagacttgtcagcgttgattttcccgctcccgaaggcccgacgaatgcgactgtctccccggcatgaatagacaaattgattcccgacagaaccggactgttttcttcgtaaccgaacgacacaccatcataacggatattcccttttaaaccggacacatgtctcgcgttcggggcgtccttgatatcaggctccgtttccagtatttctataaagcttttaaaaccggcaatgcctctcggatacatctcaataatcgcgttgattttatcaatcggacggaacagaacgttcgtcagcagcacaaaagcgacgaattccccgtaagataacgatccgcggatcacgaaccatgtgccgcacaataagacgaacagcgtgacgaatcttgtcagcatgtaactgatcgagccgtttttcgccatgattttatatgacgtcagctttgttttgcggaaacgctgattgttcacgtcaaaccgctgcgtttcaaacgcttcattgctgaaagcctgaacaagacggatgccgccgatattgttttcaaccctcgcgctgaagtctccgacgtctttgttcagttttgtaaacgcagaggtcatttttttattgaaatacaaagcaagccaaatgacgaccggcataatgataaaagtcaacagcgcgagctgccagttaataaacagcatcacaccgaacgcgcccaaaatcgtcatgatcgcgataaacaggtcttcaggcccgtggtgggcggtttctccgatatacatcaaatcattggtgagcttggacattaaactgcccgttttgttgttatcgtaaaatttgaacgaaagcttttgcagatggtcgaaaagctttttccgcatatcggtttcaatgttaatgccgagcatatggccccaatacgtcacaacatactgaagtgccgagctgagggcgtagaccccgaataaagcagcggaagtcaaaataatcagactccaatcccgccccggaagcaatgtatcgataaagtaattgacaatcagaggaaaactcagctccatcaatccgccggcgatggcagaaaagaagtcgagaaaaaacagctttttgtacggtttataataagaaaaaaattgtcgcagcacgattccgtcctcctagtgcctcgttcttaatgataatatttctcaattatactatacacaaggagttttaaaagcgttttttataacacgccggaaaataaccgtgcgaaggattccttcgttctttcccataatgtgcgcttatagaaacggacggggctgattttttcagactccttcatatcctccagataatgcgcttcaagatctttgatcgcctcttgatctgtaaaaaagacattgacttcaaagttcagctgaaagcttctcatgtccatattcgccgtcccgacagaggcgaggtttccgtcagtgatgagcaccttttgatgcataaagcctttttgataagaatagacttcgattccttcgcgaagaagctcggggaaatacgatctcgtcgcgtactgggttaaaaatccgtcattggtttccggcaccatgacacgcacccggacgcctctggcagcagcctcctttagcgctgtgcggatcggctcattcggcacgaaataaggcgtcgcgatccatacagacgattcggccgccgctatcatggcataatacagatcgctcatccgctccttcatatcggggcctgtcggcacgacttgatagacgccgccgctttctgccgcaaccgggcgggtatatgctttccgatcaatcagcacctcatccgaaacgtattcccaatcaagcataaaaatgctgtggagcgtctgaacgatttctccttcgactttcatatgagtgtcccgccaaaagccgacatcttggtctttgccgatatactccttgccgacattcagcccgccgacaaaaccgactttcccgtcaacgatgacgatcttgcggtgatttctgaaattgaatttttggttgaaaaaaccgtatttcagcggcagaaacgggacgatgttcacgcccgcgcgtttcagttttttaatatcttttccggccagcttcaggctgccggccgcgtcgaacaaaaaccgcacttccacaccttgacgcgccttttccatcataatgtccatcatcttgtgcccgagcatgtctgatttgaacatataatactcaatatgtataaatgacgcggcctcccggagcgcctcaaacagctccggaaatgtttcatccccgtttttgagcaccttcagcctgctttttgtattgatattcatatgggacgccttgattgaatattgaaagaaacgcttctgatttcctttcagcccggtcagatcgggagtttgttccatatcaaatatcgttctcagcttttcccggttgtatgtccgtttcgacctgaacagcttgcctttttcataaagctggccggaaaaaaggtaaaataagtacccggcgatcggaaaaaacacaagaatatgaatccataacagcgtgtgctgcgaggtgcggttttcaagaattaacgaatagatgctgaacaaaataatgcttgcatagcaaagcacccctccgtaaaactcaagcctggaaaccggaaaaaaccatatgacatatgctccgataagcatcatatataaaaagcaaaattccagtctccttttcagcatcccgactctctcccatctgatccgatatctctgtataccctctgttttccggcctgtaaacatatgaaaaagcctctccgcatgagcggaaaggcttatgatgaagcttcctgtgattggccgggtgtgatgttctgaagcaatgccggattgagcgagcagctgcctttgattttatttttgaagatgccgatgatcagaccggtgaccgctatcgacactaaggagaagagccctttcagcaacccgacggaaaaaatgccggccagcacgacgccaaaatcgaagaggaaattaacggcacccggattccatccgcagcgcttttgcagaaataaagcgaggatattggcgccgccgagcgatgcctgatgataaaacatgagcgacaagcccaacccgatcagcgcccctccgcaaatcgccccggcaagcggtgaaacagagaccggcggcagccagtgatccgcgccggtaaacagagtcagtactgtgactgcaaaaacggtggatagagtgaatttgattcccattctgatgagagaaaatatataaaacgggatattaatcagaaagaagataatcgcaaacgaggaatgaaacaagtatgacaggcttagtgacagtcccgctgtgccgccggttaatacatgagaatgtctgagtgtcaggacgccggcgcttgtcatcagacaggcggctaaaatgaggaaaatccgcttcattcttcactctccttttgttgatgttatttccaaataaaacataacaggaatcccggccgcccagccattaccttggcagaaaatatcttatgtttttattttttcaccataaaaaatccccctcttgcaggggggatttttacgtgcgtttccgatagacaacatagctgcgggtcaaatacttgaggggcaggctgaacacgtgaaccaatcttgtaaacggccaaaggataaaaacgacgtaccctatgatgatatgaaacttaaaccatagcgggacactctccatcaaagaagcgtcaggccggaacaaaacaatttccctgaaccacggcccgactgttgccctgtaatcaaatcctttcgagtcaatgttgaggaacgtggccgcaacgcccgacagcatcatgaacagcagcagaataagcgtcaagatatccgatggcgagctgcttttgcggattcttttgtcaaacagccttctgtacgtcaggatgacaagtccggcacatgcagcaatccccgccggcaggcctgcgccgatcgccattttgtgatacatatgctctgaaatgccaagggaagcatacacgccttccgggatcagaattcccatgacatgtccgccgacaacgcacagcagtccccaatgaaaaagtgtgctgccagcggcaagttttttcttttctaacagctcgcttgatttcgccgtccagccgaattggtcatgctgatagcggtaaatatgaccgccgataaagatcgtcaatacaatgtatggcataacgccccacaggatctgcccgctcatgcctgaacagccccttcttcagtgctttcatgtacaccgatgttttccagtgcggcctgcagtacgtgcagcagctcagcatagatgctgttatttttttcgagacgggaagccagctccctcacattggacaggtatttttcaaacacgcttctcgccgcttcaatctccgcaaccgcagcgaattccagcatcagcggcaggtaatcaggcagttctttctctgtcggcaggaaaccggattgctggtaggtgttttttaaatgcagcaattcaatgccgcgttccctttgttcgcctgagttaaagtaggtgacgtacatattcgttttttttccgaaatcgaacgtatacacatagtgttcaatcagcgattgcggagaaaagccggctgccgcctctaaaaagtgcagcaatttctcccggatctgctgattggtgatgtcatggataagagccttccaatcgggaatctcggctctccactcttcctccggatatgagagaagaacggaaagagcggagaacgtcatttgccggtctgtggtgttcatgttattacacctcatttatgaaaagttagaaacaagagcccgggccgcctgaaaatgataagccgcagctcccttgttcagcatataaatctgacacttcttctcgatggctgctcgggatcacaaaacggtcatcatatttggcgattgccagcagccgatacatgtcttcaatttgctgttctgttaagccgacactggagaccaatgccgggtcgatggatttatttgtctgaaccgccctcatatactggcgcatgacagacattttctttaacgtggatcgaatatgatccgtatcccccgccgttaacagctgcgccaaatagtcaatcggaattctcatttggtcgatagccggaaaaatcgcttccgccgtttgccggctgccttttccttcaaagagattcataatggggctgagcggcggaatgtaccacaccatcggcagcgtacggtactcagggtgaagcggaagcgcaatcttccagtcaatgatcattttatagatcggcgattgctgcgccgcttctatccattcagccgggatgccttgttcttttgcctgtttggcaacctcgggatcattcggatcaagaaaaacgcccagttgggaatggtagagatccttttcattttcaacagaggccgcttcctccactttgtccgcgtcatacagcatgacgccgagatagcggattctgccgacacacgtttcggagcagatggtcggcagccccgcctccaagcgcggaaagcagagtgtgcatttttccgctttgttcgtctgccagttaaaatagacttttttataaggacaggatgagacgcaatatctccatgaacggcatgcgttttgatcaacaagcacaatgccgtcctcctcacgtttgtacatggcgccggacggacaggatgacacgcacgccggattgatgcagtgttcgcaaatacgcggcagatacatcataaagacttcatcgaattctgttttgatcgattcctccattttttgcacgtttggatcttcaagccctgtaatatggccgcccgcgagatcatcctcccagttcgggccccattcgatattcataaaatcccccgtcaaggacgatttcgggcgcgctaccggctggtgttttttctgcgggctgtttgttaatgtttcataatcatagttccaaggttcatagtagtcatcaatcgtcggctggttcgggttatagaaaaggcctgcgagccggtttgttttcgggcctgatttcagttcaagctttcctttttttaacgtccagccgcctttatatttgtcctggtcctcccattgcttcgggtagccgataccgggctttgtttctacattattgaagtacatatattccgcaccggaacggtttgtccacgtgtttttgcaggtgacgctgcacgtgtggcagccgatgcatttatccaagttcatgaccatcccgatttgcgctttaatcttcaagccaatcgacctccttcagcttgcggatgacgacattcagatcgcgctgattccccgtcggaccgtaatagttaaagccgtaactgagctgtgcatagcccccgatcatctgggtcggcttgacgtgaatccttgtcgggctgttatgggtgcctccgcggttattcgtcagttttgtgccgggcacattgatgtggcggtcctgggcatggtgcataaacgccattcctttaggaatccggtgagacaaaaccgctctcgcgacgacaacgccgtttcggttgaagcattcaatccaatcgttgtctttgatatccgtgtcctctgcgtcatctttattcatccacacggtcggcccgccgcggaacagcgtcagcatcggcagagaatcaaaatacatgctgtggacggaccatttattatgcggcgtcaaataattaagaacgatttctttgccctcttgatcaggccgcttgcttaggaacggacggtgctggaggattggtttaaatgtcgccatcgtttcaccgaattccatcatcagttcatgatcgacataataggattgtctgcctgtcagcgtccgccacggaattaatttttccacattcgtcgtaaacggcgagtacctgcgccctcctttttctgaaccggtaaaggccggagaggtgatgaccgttttcggctgggctgtaatttgctcgaacgtaaagcattcttcctcgcgctcttccgccaggtctttcagctccagattggtaatgttttcaagtgattcccatgctttcacggcgacttttccatttgaggtggacgacagggttaaaatcgcttccgccgccagcttcgcttcacttatattcgggcatcctttggcaacgctgtttgaatcggtttctcccagtctctgtttgagtgattcatattcatccgcaatcgaccagctcatcccttttgttccgctcggttttaaagccgtattagggccaagcgcggtcattttatgaaaaatgtgtttgtaatcccgttcaacgacatggatgttcggcatcgtttttcccggaatggcttcacattcgcccttgctccaatcattgattttgccgaatggctgggccaattcctgcatggtgtcatggaggagcggcgtcgcaaccacttctttcaccggctccaaatcgacttcttctgccagatcggaaacggcttttgacagcgccttaaaaatatcccagtctgacttcgattcccacggcgccgagatggccggagcaaatggatgaataaacggatgcatatccgtactgctgagatcgtgtttttcataccatgtcgccgccggcagcacgatatcggaatacagcgccgtacccgccattcgaaaatcaagattgattaacaagtcgagcttgccttccggcgcctgctcccgccatttgatttcttcagggcggatgctgtcgctgtcgtcattcatcagaccgttcgtcgtccccagcagatgcttgagaaaatattcatgccctttccctgagctcgagatcagatttgcccgccatacgaagagattccttgggaaattcacttcattgtcagggtcttcaatcgcgaatttcaattttttttcttgaagccgtgaggccacgtacgcacctatgtcttcaggtgtcgccgcccccgctttctcagcttctttgtacagatcaatgccgttttgattgaatgtcgggtaagacggaagccaccctaatcgcgccgccagcacattgtaatcggcgtgatgcttgtagcgggatgacgcggcgatcggtgaagccaagtcactgatcggctggtcttcataacgccactggtctgtcgcaaagtagaaaaacgaggtgccgttttgcagcttaggcacgccttcccagtcctttgcggttgcaatcgtctgccacccttcagccggacggagtttttcctgccccacgtaatgggcccaacctccgccgtttacaccttgggcgcctacgagtaaaacaagatttaacaccgcacggtaaatcgtgtcggagttgaaccagtggttgatccccgcccctacgataatcatggatctgccgtctgtatcaatcgcattttgggcaaactccctggcaatctgtataacggcttctcttttaattcccgtgatctgttcctgccaggcaggtgtgaacggacggggatcatcataggatgcggctgattgtccgccgatgccccggttcacgccgtagttggccaatatcaagtcaaacacggtcgtgacgtacgtctcttcaccgttcaggtccagttttttaataggaagatcccgctccagcactttgtttccgtcatctgaaaaatacggaatgcgcactgagccgatttcgtcctctattccgagcactgagagacggggctcaatctgttccccggtgtcttcgtcgatcatgtgcagattccatttctgctgcccgtcccagcgggagcccattgtgccttgcggtatggcaaacgcacctgtctgttcattccagaccgccggcttccactgatcattttttgtctgccgcccgatgtcttttgcatgcagaaaccgtcccgctgtatacacgccgttctcttttgaaagagtgacgaagaatggaaaatcggtgtattgcttcgcgtactcaataaaacgttcagtttcttggttcacgtaaaattcctgcaaaatgacgtgacccatcgccatcgcaagcgccccgtcagtcccctggcggatactcagccagtcatctgcgaactttgaggattccgcaaaatcgggactgatcgaaatgactttagcgcctttatagcgggcttccgccagaaaatgcgcatcaggcgttctcgttaacggaacgttggagccccatgtgatgatatagcctgaattgtaccaatcactgctctccggaacgtccgtctggtcgccccaaatttgcggggacgccggcggaagatccgcataccagtcataaaaactgagcattgggccgccgattaacgacatgaatcgcgaacctgatgcgtggctgatcatggacatcgccgggatcggagaaaaaccgacattccggtcaggcccgtatttcatcactgtatacagcagagaggctgaaatcagcttcagcacctccggccattccgcgcggacaaagccgcctttccctcttgcctgtttataggacttcgctttttcagggttttcaacgatcgatttccaggcatccaacggattgtgatgcgcctgcaatgcttcccgccacaaattgatcagtacaccgcgcacatatggatatttcacacggagcgggctgtagatgtaccaagaaaaactggccccccgcgggcagcctctcggttcgaaatcaggcatatccgggcctgttgatggataattcaagttttgtccttcccacgtgacaattccgttttttacataaatattccagctgcaagaacccgtgcagttgacgccgtgggtggagcgaacgactttgtcgtactgccatctgtttctgtatacattctcccaatcacgatcttcgcttgtcgtttggctatggttatttgaatgatgttcgataggagaaaaatagtttaatctcctgagcaacggactcattttctttttcttcatgatcgttcactccttccgagtcaggtgatgctatgtacactataaacagagacggcgcgtttccttgtgaactatgtcacacactctgcttttttcacaaaacgttcacacagagcagcaggaaggattttcaaacgatatggggacgcccggcgtcatcaaaaaaaaccggttctgtttaagaaccgggttcggcgttttcatcccgtgatgtatgcagataccgcaaaaacaactgataggaacagaagacattttgctgaagcatcgccaaaaagttcatttgcagccgcggatggtaagacatcatttgcttaaatacggaatatggaatatggagtaccaggatatccggtgaggcattgactgagataaaaggcgataaagagagcccgcctttttcatcaatcggaaacacatcgcctttttcccacagcgcaacggtttgcgacccttcagggagcctgctgtccgtaaaacggatattgccttttaatacaatataaacggattgtgaatgaagaaaggatggagattggtcagatgagccgcggataaacgtcccgtttttcagcaaggtttcgacaatggacagaggcacttcattaaacataggaagttgtttcagaaataataaatagtcacactgattcataggaaagcctcctgtgctaaggatagctttagtgtagcccgattgagcccgcgcggcagtgatgtatttcacagcttgtatgataaaagtcacttatcaggagagtgtatgtacttataatgaaataaaaaggagggtttcgatgaaggcgatgattccgaagcagcacggcgcatgggcgatgctgctgattccatttttactcggcatggtcaagggaggcccggttttctggcatgttccgctctttctgggctggctgttcctttacttagcggtttatcccgtttcgctcgctttgaaaaagaaacagcttcagccctatcaaaagtggatatggtattacggttttccggcctgctgctttttgatcatttctgtctatcataagccgcagctcgtctggatcggcgtttttttattgccgctgtttctcatacatacgcattatgcccgccgaaaaaacgaacgggcgctcacgaatgatattgcgggtgttctgttcttttgttcaggcgggcttgcgagctgctggctgggaacgggaatccttgacggctgggcctggtttctattcttgcaatccgctttattttttgtcgggagttctttttatgtgaaatcggtcatacgggagagaaaaaacagaacctttgcatactggtcgtggggatatcacctcttgctccccattttatcggcttttctcggggcaggctgggcatttctcgcttttatcccaagcagtctgcgggcctggttttttcacggaagagactggccggtgaaaacgatcggcattctggaaatcgtaaatgccggcttctttttcgccgtcatgtgtatatgtatcacaagctgaaaaacaaggacaccggctgcccttgttttttttcagtcaatattgcagatctccagcggacaattttcacactcgatctcgcatcgtaaatagtcccgcttgtgcaaaataatttttccggtttcgtctatcgaaataaccccttgtttgcggaggtctcccagcatgcggttgacgctctcccttgccgccgcgcaaaacttagccaaatcctgatttgtcagcacaatgttaatcagaatcccgtcgcttcgttccaccccgtagctgtttgataagcggataagggtggaatagagcgccccctttttgccgtgaagaagcaggtccctgatcttggactggatttttcgaagatgggtgctcatccatttcataaattcaaacgtcaaaacaccgttttggatcaattccttttccagcttgtttttattaatgacgagcacctcgccatcctctaacactttcgcactgagcatatatctcggctcatctgtgaatagcgtcaattccccgacaatatcgtttttttggcagattctaagcgtcaggtcttttccgtcagatgtcagcttgccgatttcaatgagtcctgactgaatcagataaagctcttttgcatccattccttcttgaaacaaataagtgtgttttttcattttccttttcgtactgatcgattccagcaattcatgcagttcgcgggaaagaagttctttatcggattttcggacagagagaatattcatgagctcacctcgaagaaagtcacgttgcgtatgtatattgtaacgtgacttgatttgcactcacccagaaaaaactaacaatcttgtgaatggatcattatgaattgaggctctgactgtttctctccgtatgtgttttcattctttcctgccaatacatccagatcacaagaacaaagctggctaacgcggcctctgaaagcgccataaacccgatcgcgtattggcctgttgcctgaaatacacttgccagaatcagcggagggaaaaaaccgcccagtccgcccatagcagacacaatcccgttggcaattcccgcttgcttcgaaaaatagaaaggcaccagtttaaataccgttccgtttccaatccctgagcagactgccaccgtcagcgatccaaacgcataaaggccgatcgtcggggagaatgacagcatgacccctgacagcgtaagccctgcgaaaacgaacatcagaatacggagcgggctcagtttatctgcaagaaaccctcccacaggcctgagcagcgtagagaccgcaataaagccggccgtccgcagaccggcgtccgcagggctcagcccaaaatgctcaaccaaaaaattcggaagatagatggtaaaggcgacaaaggcgccgaacgtaataaaataaaacaggctcaacatccacagcacatgatttcggtaaacggctttcatttgtgtctttatggaaactttgactttcttctcatgccggtcgccgaacaaaacgtgcagtaatgcgaaaacagccagcaaaacaagatacatctgcacggttgctttccatcccgcggcttgagcgataaccggcgccgcaaaggtagtaacggcggtgccgatgtttccggcaccgtaaatcccattgacgacaccgtgcttttctttcggataatatttcgggagggacgtcactccgatggagaataccgctcccccgatccctaagaaaaagccgcccgcgattaaatcaaataaagaatccgcgatactgatccaaaatacaggaaacaaaagcaggatgaagctgatcataaacatcagccgcgcgccatacctgttcgttaaatatcctaaaggaatacggagaagcgatccgagaataacgggaatcgccgtcaccaatgaaatttcgcctttgcttaaatgaatatctgatgtcatttgagaaatgagcgatgaaatcagcacccacaccataaaccctgccactaagcttaatgactgcaacgataattgaatatgttgacgattgatcattcggcttgcccctttcactgattcaatatcagtcttatcatacaaaaactcagtgtgcgggattgtgaattacatcacacgctttatatacaaaaaaagaacaaagcccgaagactttgtcctttgatcatcattacattttttccggagcggatacgccgatcagctgaagcgcattgttcagcgtaatttgcgtcgccttcattaaagcgagacgcgcgcggctcttctctttattttccggatcgatgactttctccgcattgtagaagctgtgcagagcggaagccagatcataaatatagtttgtgacacggtgaggaatgcgtttttccgccgcttctgccactgcctcagggaagccgccgatcgttttcagcaggtcatattctttttctgattgaatatggctgaaatcaagatctgccgccggtttaagtccctgctcctccccttggcgaagcatgctgcaaatacgtgcatgtgcgtattgtgcataatacacagggttttcgttagatgtggatacggcaagatccaagtcaaaatccatgtgcgtatcagcactgcgcatcgcgaagaaataacgcacggcatccaagccgacttcttcaatcaagtcgcgcatcgttacggctttccccgtacgtttgctcatcttcattttttcgccgtttttgtataaatgaacgagctgaatgatctcaacttccaatgtgcctttcttgtaaccgagcgcttcaattgccgctttcatacgcggaatatacccgtggtgatccgcgccccatacattgatgagcttgtcgaatccgcggtcaagtttgtctttatggtatgcgatatccggcagcaaataagtgtatgagccgtcttttttgatcagcacacggtctttatcgtcgccgaacgttgtggagcggaaccatgtcgcgccgtcctcttcgtatacatggcccttttcgcgaagcgcctcaagcgcctgatcaatttttccgttttcgtacagtgacgtttcagaataccatacgtcaaacggcacgcggaaattttccaggtcggagcgaagtttatcaagctcgtactttaagccgtattcacggaaaaacgcctgacgttcgctctcctcttcatgtacgaaacggtcgccgaaatcttcggcaagctttttcccgatggcgataatatcctcgccgcggtagccgtcttccggcatcggtttctcgagaccgagcgcttcaaaataacggacttcaacggaaagcgccaggttgttaatctggttgcccgcatcattaatatagtactcgcggctcacatcatagcccgctttagaaagaacgctgcacagcgcgtcacctaccgccgcgccgcgcgcatggcctaagtgaagatctcccgtcgggttggctgatacgaattcgacctgaatcttttcgccttgtccgatgtttgtctctccgtaatgttcacccgcttcaagcacggacggaatcagttttgttaagtagctgttgttcatgtaaaagttgataaagccaggtcccgcaatatccatcttttcaatggaagctttgcctttatcaaatgacgccacgatctcctcagcgatttggcgcggcgctttttttgcgattctcgccagctgcatcgccatgtttgtggaataatcaccgtgtgttttttctttcggcgtttctaacagtacgcttggaatctggctttcttccgccaggcccgctttcagaacggccgctttgatttcttccttcagcacgtccttcatttgttccgcaatgttcatgcgtgagttcctccctcatacgtgatcgtcatattatgtaaatgctgctgcccgtctccgacatgcatgtcatatgcgatgctgattcggcctttttcttcaccgagatcagattgaatcgattttgtgcttgtttccagctcaagctcaccaaatgacattttatatttcgcaattgtggaagctcccgttatgaaacgctgattcattttaacagcgcctgacctcatgatcaggacttcgccttcgctcaccttcacaatcgtttttactttgcctaggtcgtgttcttcataataagatagatacactttttgttgttttacatagtaaaatccggtagtacggaattcgatgacttcatcatttccgtcatcctcgatcacagacttcacatggagtgttatcggtgtctcttgcttcattttgacacgtccttttcatcattccactttgacttgaatagtataatcattcagcttgtaaacttcaactgcttctatcttaccatcattgctcattagatttgaagataaacctcataaaaagcagttccttatgagaagagaaaatcatatcactatgtcacccaatccgtaaaaaacatgacagcagcttttcagaaactcacacagtctcatcgaagctgctgcgacttccagcaacatagattgtgcagcagaaatgccaacgatgtcaaagcgctgcgtgacagctataaaaacgtccgccaaacacacgtgattgctgctgtattatgccaagtcatcatattcggctgcgtgttcgaaatcgtcaaagccgtccctttccgctttcacacgccccttgccgtatcaatgggactcgcggtgttctgattttgtatttattgtattttatgcggacgtacttgctgcagcttttccagcatgtcagcctgttcaaaaaagggcatgcgggagcgctgacaggagccggggtttggcggatgctcagtttcgccataagtgaactgctgtttttaatcatcctggctgccatccagcagatcggctcatttatttataaacgatttttttatcgcagctctgcttctctcaactgtgaaataagctacatcgcaatcgctgacggaccagtcccaaccggaatcaccgtcatggctgtataatcactcgtgcggtacacggttacggtattgtcgccgggctgtgctgcataaatgtactgattatcaggtgttacggcgaggtcaaaggcgccgggcagagacacgtttgcaatgatcctctgtccagccgtattaactacgtataagttattaatgagaaacggttcactatatggctctagaaaataagccctagtgctatcgcgagaaaatacaatcgtcctcagcgtttcaaataaacggttgaagtcgcctcccctgcttaatggtgacaaactgatctccgttacacctttcggcagcagctcaccattcaacacatacgcaaaattcccagcgtaaggagtggcaatgaaactgggaaattcaaatgtatctatgatactttctaccaactgcccagtatttacatcatatttatcaaccgaccaactgcttccattagcggtatagacatactgtccattcggatcaagagcaaagtctaaagcgccgggtatcggaatgacatcaatgaccgattgagaggccatgttgatcatatatatagatccggcggccatcacgtacgcgaactcatctgttgaatcaaattcaacctttctcggccctcctccaacagtgatggtatttatgatggttaatgttttattatctagcactgagacaaggttggtattcccatggaggacatacgtgaaagctttatcgaaagtaacgcctagattagttggcacgtgagaaaaagggattgtttttacaacagtgtttaaatctgaatcaataaccgaaaccgtgctgtctcctgaattggctgtaaacacatacgattgagggtctggcggtggcggtaaaacaagcgtcccggtcaccgtaagcggactgccgtagaaaggcggtacaatgagaagatcttccactgttatttgactgaaatcaggacagcggccagactgcgctgcataataaacaacttgatcaatctcttcagtatgaatcacagaaacagacccgtccccttgtccatattgatttcgtacaggcgacacactgacaagaagcgtaacggtcccttttactctcacggcatatcgaacaccgatatcttctggttccggcccagtctggattaagcaaggctcactgatacataataaatgagcagtactccatgtaaccgtcgcagctgcttcggcagaatcaatggtgaacccctcgggaatgtcaatcggcacttgaaacggcgcttctctgctaatttcctcatcacaaaaacagaaacaattttcctgtaaagcagacagatcattctttttcatgaattcacgtccttttagaaatgtacagcatgcagttggttaaatcacaatatctcccggtgaaaccccaagagatatcacagtctccacagaataatcatccgtgttgtaaacagtgatgttctgctctaaaaaatgagcagcatacagaaattcgccattcggagtaaacgcaaagtctcttgccgattgcggaacatttcctataacgcctgcaccattcggactgacagcatataaattgccagtgaagctgtcatgtaaatacacctctgatccactcgtaaacattacatattggccatcaggctccagctcttgggtaatgctgatcgtaaacgtatttaagtcaataaccgtcaaataattgaataagaattcttgttctaagacatacgcataccgctccggccaatttgtttctatggatgatacgataagctctcgttcaatcgttcctgtgacttcaccggtgaataggtccactttttgcactaaaccaaaatcaagaacataggcgaataacccattgggatcaattgcaaaatcaaatccttccacaggaatcgacctatccacagttaacgtatcaattccaatcacataaatcgcagtatcgccgagaacataagcaaactcatgatttgggatgcattttatcgatccaggcggctgatccagcagtatggatgctgtcactgttaaagtgtcataatcgatgacagaaatcacattattgttgaagtgcaaaacaaacacagcgcttttatccggagttatttcaatacctgtcggccggtacggtagagcaatcgttgtcacaacagtatgagtgtttgtatcaatcacagaaactgattgatcatttggattcgctgtaaacgcataaacgggttccggctcaggaacaaacacaatcgtgcccgtcaccgataaaggactgccatagaatggcggaacgacaataaggttctcgatcgtaatgtcactgacatccgggcaatcatcgggttcatcagaataatagacgacttggtcaatctctgcattgcggatgacagaaacagacccgttcccttgtccatattgatttcgcactggtgagacactgacgagaagcgtaacagttccctgcaggcgcactgcgaattgaacaccgatttcatcaggctctggccccgtctcaatgaaacagcgttcaatgacacaagaaaggctgtctgcattccacgtcacgtttgcaacagcttcagccggatcaacaacaaacccctcaggcaattcaatcggcgcttgaaacatcgcttcacggcttgcttcttcctcgcaaaaacataaacattcttcttgtgcggctcctgctttttctttaaaggaaagcttgttatttctcatatcttcacttccttttcagacatacactgctcacgcagatacaacagaatatgggaaggtgtatttgtttgcttgtacaaattgtggggataatagtggatttttgaaatgatatccgcagacatgcggttttaacgaaagaaaacattgcggtatttttgcgctatccttccgaatgaaaatgataaaatatgtcatatacataacgtggaagggagggattgggaatagtggcgagtgttttatcatcttcagcggttggagaaaaaatcaacgaatggtatatgtacattcgaaggttcagcatcccggacgccgagtacttgcggagagaaatcaaagaagaacttgcaggtctggaagatgatcaggatcttcatctatactattctctcatggaattccgccacaatctgatgctcgaatacctcgaaccgctggaatcgcagcggatagaagaacagccgagactatcggatctgctcgcggatattgataaaaagcaggcccggctgaccggacgtcttgattattattttaattttttccgggggatgtatgagctggaatgccgtgaatatctttcagcgattcagttttttaagaaagctgaatataagcttgattttgtcaaagattgtatcgagaaagctgaattttattttaagatgtcagagtcctactattatatgaaacagacatatttttctatggattatgcccggcaggcttatgaaatttatcataagcaggaggcatataatataagggtgcttcagtgccattcattgttcgctaccaactttcttgacttaaagcaatatgatgaagcaattcagcattttaaaaaggcttatgccatggcagaggcagaacagcagccacaattaatgggccggactctatataatatcggactttgttttaacagccaagaaaattacaaaccagccattgattacataaaacgggcaatagctgtttttgaagatgggaacatcatcacttctctcccgcaagcctatttcttaatcacacaaatacattataaaatcggaaatatggccatagccagacaatatcatgacaaaggggtatcttatgcagaggaggcagaagattccctatatatagtcgagtatgaatttttggaatctttgtatgtcggtgagcctgatgaagaagcaatcatggaatgttttgactttctcagagataaatcgatgtatgctgatcttgaagattttgccttagatgtggcaaaatattatcatgaaagagaaaatttcgagaaggcttccgcatattttttaaaggtggaagaaacaagacagcagattcaaggaggtgtgaagttgtatgaaattgaagtataaattagcacttacttgcttggcaataagcactgtttttgtttcagccgacatcgcaagtgcaccgaaacatcaatttgaagttgctcagcgcggaatgatttaaatgatgattacttttaggcttgcaggttaaactgcaagccgttttttatataaacaactaatttgcaaaaacaaaaagtataccttaaaattcaaatgtgtaaaaagtatttgacacatatacatatattatttaaaataaatatatataaatttgaaaatttaaaataaaaacaaaaatatttaaggagggttttagtggataacaatattaaaaaacttagaacagcagctgatatttcacaaaatgatctggctaagctctgcaatgtgaccaggcaaaccatcaatgcaattgaaaataataaatatgacccgactttaagtctggctttttcgatagctcacgcattaaatacgggaatagataaagtattcaactataacgccaaaaaaaagtaagggagcggttcttatgaagaaaatggatgagatgcaaaaacaccaatcgggtatagccgccagaataacatttagtttttatactgtcgctttactgatatggtcattaatagattattttaaaaacggaaatacaggatggcaatttccaatacttttaataggctgcgcgctctatttatggattcaagtttatcataatcgaaaaacaaggtaacaattccaatacacttccggaggattatacagcaatgtacgaatataagttcataaaagtagaagtaaaccgatggaaaggaaagcctaaagaagactataaagaaattattgaaaagtattcgcagcaaggatggaagctggttcaaatatttgctcctcctatttcaggttatggggcagccgattattttgatattattcttgaaaaaaaagtataaatgtttcagtacaaagaaagccggatcatacatatggtccggctttctttgtactgaaataagccagcagataccttaacggatttcacctcttaaatattttttcggaaatccgcaattcaaatagcttccaatatattttattatttaacttgctggggatattgaaaaaattggaggaaaaaatgagtctacttttaaaaacacaaaatagtaaagcgatttttacattagtagcatcaggaatcattgttctcgctcttttcagtataaaacataatcatttaagcatggatgtcatcgatattttaaacagagctggaataatagctcctagttggattgtcagtgctatcactgcaacgggttcagtcctggctatcattactgttttaggatctcttggtgcaggcttgccattagccgttttagaacaattggctgcagcaagtacagcagcagcttaatataaaacattaaattcaatatccctggcagtcccttaaacgaatggatgaaaatactttgtttaaaaagaacgttttagtcaaattgtacatactctgtctgatcttatttttaattgctttatttacagcatatttttatacagatcccgctacaaatgtaaataatctaaatcgaaatatccgtccggatttttttcagattttctttaataatattaaagtagcgagtctgcttgtttttttaggcccgttgacgctgtcacttggcacgattgcagttttaattattaatggattaattttaggaaatgccataggaaacatcaaagacaatttaaaccttttactgcttgttataccccatggaataattgaagtcccggtattgcttcttgcagcttctgtaggaatgaaattaactttggatttattactcctcaaaataaatttaaaattcacttttaaatatattggtattatatttctcggtttaatgatagcagctatgttagaaacatttcttacacctatctttataaaaggagtctcttaggattatgcaaattgaattatcttcatttaaggaccgaaacattaattttttgtcctcgtttttgttttatattatcgggttagctttttatttaagttccctattgccttttatgaaaagtttaattcccaaaaacatccctatacaagttgttgagcaagtaaaacatttagattatatcattgcgatagccgcactgttacttttaatgttcggggtgatttttgaaggatttgtattatttctcattataaattttcttggcgctcaaattaagattaaaaccttttattccctatttatgttttctaacatcccggtcgcaattaagttttttcttatatcattcaaaaacattttcgcggaacatccaaacactagtttatttttcacaagtaatcatttgattttttctatctttgatttgttcaatattgcatacttatttcttttgtttattcttctgaaatggagaacaaatttgaactacctgacaatctcagtttttatttttacggcattcctgtatagaatgtttttttagcatatataaataaaccccctcaataggggtttttctttcatttcgttcactgtatacaattccttttatatgcttccgaaacaataccgactctagtactcacattccactttttacagagaccggctatgatatattcgacattacgctgcgagtagtttaatgacttagcgatctctttattaggtttttcagcaattatcagtttaattactgaaatttcaatcttttttaattccaattcattttctactgctgttttcattctaacttcctttctaaaaatgtatttactaaataataccctattatataatttttatcaataacatcaattattaatggtaaaataatatgttgcttttactaacttctaagtagtttatatacaatataaaaatcccccgcatgtttcaagcgggggattttcttttatttcacaaacccaagcagcatttcacgaatcatcttgcttgccgtgtttgcggtttgttctgagtggtcatagaccggcgcaacttctacgaggtcagcgccttttacattgacttctgagcgcgcgatttcatggatggacgcgagcaattctttagacgtgatgcctcctgcgtcaaccgtgcccgttcccggcgcatgagcgggatcaagaacgtcgatatcgatggtgacataaacagggcgtcccgcaagctgcggcagcacttttttcagcggctcaagcacttcaaacttagaaatgtgcatgccgttttctttcgcccattcaaattcttccttcattccggaacggatgccgaatgaaaatacgttttgcggcccgatgagctcggccgctttgcggatcggagtagagtgggaaagcggttcgccttcataatccgtgcgcaggtcggtgtgcgcgtcaaaatgaatgatggcaaggtccggaaatttcttatacatggcttttatgacaggccatgatacaaggtgctcccctcccatgccgagcgggaactttcctttttctaaaatgctgtccacgtattcttcaatcatatcaaggcttctttgcggattgccgaacggaagcggaatgtcgccggcgtcaaagaaattcaaatcagccaagtcacggtcgagatacgggctgtattcttcaagaccgatagacacctcgcggattctccccgggccgaaacgcgaacccggacggtagctgaccgtccaatccatcggcatgccgtaaaggatggcgtccgcctctttccagtcggggcggcttgcgataaatacttttcctgaatatgcttcatcaaacctcatgataaaaccctcgctttcctgtaaaaaagcgcaagattcgctcctgcgccgtacgtttttatttgattaagtcgctcacaaatttcggaagaacaaatgccgctttgtgaagctctttcgtgtaatatttcgtgtcgatgtcaaagaaacggctgtcctccacttcaagcggatcgtactttttagaaccgatcgtaaatgtccacaggccgctcgggtacgtcgggatattagccgtatacaggcgggtgatcgggaagatttctttcacgtcacgctgaacgtttgtaatcagttccggtgtaaaccacgggttgtccgtctgcgcgacgaagatgccgtcttcttttaacgccttggaaattccggcatagaagccttttgagaacagattgacggccggtccgaccggttctgttgaatcaaccatgatgacatcatactcattctctgatttcgcaatgtgcatgaaaccgtcatcgactctcacgtcgacgcgcggatcatcaagcttgcccgcaatggacggaaggaattttttagagtattcaataaccttgccgtcaatgtcgacaagcgtcgctttttttacgcttgggtgcttcagaatctctctgatgacaccgccgtctccgccgccgacaacgaggacgttttccggattcgggtgcgtaaataacgggacgtgcgcaaccatttcatgatagacaaattcgtctttttcagaagtcatgaccattccgtctaagaacagcatgttgccgaattcttctgtctccaccatttccagatgctgaaattccgtctgttccgtatgtaatgtttgtttcacctttaatgtaatgccgaaattcttcgtctgcttctccgtataccaaagctcgctcaattgtcatctccctttcaaggcttatttcatttattgtaagcgtctgtatcgcttttattccggttaaaatctcattttcacctaaggaaaaagtatagaggatggaggggaaaaagtaaagaagtgtccggtttgatatgtttaaaaaacccccttttttcacataataatagaatcatgaaaaagggggttcccaaaagtggataaagtatctggaaaacagctcagaatcacgttcaaaatcatccgcgcctgcatctttctgacactgatcggcggaatgctggccggcgtctgcttcacatccgttcttcttgcagcgaaatggcagggggccccctccgtccgggttcctcagtctacgattctttatgcaaatgacggctcaaagctaggtgagaccgatttcggggaaaagcgctactgggtgcggttaaaagatatcaatccgatagcggtgcaggccgccatagcggtggaggatcaaaacttttacaatcaccacggttttgattaccggcggatggccgccgccgcgctggctgacataaaggcaatggccaaggttcagggcgcaagcaccatcacccagcaatacgcgagaaatctctaccttgagcatgataagacatggaaacgaaaatggaatgaagcattttacacgatccgccttgaacagaactattctaaaaacgagattttagaaggttatgtaaatacgatatattacggccacggcgcatatggaattgaagccgcctcgcgcctgtatttcggcaaacacgccaaagatctgaacgatgcggaagccgtgcttttggcgggcataccgaaaggcccgtccggctattcgccatatgtcagcgaaaagaaggccaaacagcgccaggaaaccattctccgactgatgatcggccaaaaaatgatctcaaaagaaaaggcggaaaggcttaagaaaacgccgcttgcctatcagccgctgaaaaacagaaccgcggcgaaaacggcgccttatttttacgatgatgcgatgaaagaactcgagaaaaagctcggcatgacgcgcgaacagctggcaacgagcggattgcgtgtttatacgacgcttgataagcgcatgcagcggattgcggaaaacactgtggcacatacgatccgtaccggctctgacattcaggtcggcttttccgcgattgatccggcaacagggcgcgtgcttgcgcttctcggcggacgtgactacgaaaaaagcccgtttgaccgggcgacacaggcgaaacggcagccggcttccacgatcaagccgcttttgtactacaaagcgattcaaagcggctttacaccggtcacgctgatgaaaagcgaagccacagagttccagattgacgacaacggagatacttattctccaagcaattacaacggctactacgccaataaaccgattacgctgcttcaggcgcttgcgttatcagacaacatttatgccgtgaagacccatctctttctcggcatgaataagctcgtgtcggcggcaaaggaattcggcatcagcgaacatttaaagccccttccgtctctggcgctcggaactgaacccgtgcgcccgattgagatggttaatgcctacgcgatgctcgcaaacgggggaaaacaaatcaccccttcctttatcacaaaagtgacggataccgccggcaacgtcttgtatgaacagccgcgcggacatcagcagacgcttgataaaaaagccgcttttgtgacggcgagcatgatgacgggcatgtttgatcaggatttaaacggctatacttccgtcacgggacgcaccatttctgaccggctgacacgaacctatggcggtaaatcaggcacgacgagcgcagacagctggatgatcggctttaacccggctcttgccgccggtgtatggacaggctatgacaaaagcagcacgattgattcagtagaggaaaaaagctatgcgaagacgatttgggcggactttatggagaaggcgctcgaaggagaaccggaaatagcgcttaaaccgccgaagggcgtcacgggcgtctatatcgatcccgcttccggctacacttcgggacccggctgcgccgcaaagcattatacgtatttcatcgcaggcactgagcccgcggatgtgtgctacggaccggaaccttctaaaaaagaaaaggaacacgcccccgcccgcaaagaagctccgcgcaaaaaatggtgggataagtggctcggcaaaaaagactgagcccggtgcattgcgcgccgggctttaatccgcgtcttcctcaagcacccacgggagcaagagtgaaaagtcgagatggataatagggtcaggaaaacccttcggtataaaaaatgttgtactcggcaatgaaaacgaaaagcggatatctcccgccctctcgatatgaaaattcggccagccttccctaagcctgccgacaatcggatagctgcccgcataatgatgcaggccgttttcctttccatgctcccccaaatcgtgacagacagccggacgaatcccaaactgcgtaaacaatcttgttttctcggcgggaaggagattcaccgcctcggaaaagttccggcagctcccgcaatcgcaaggatcaggccatgatttttcgtattgttttctcgtttcctccgcatctgcttcaatgacccatggcccgatttcaaagacggtgaacatgatgaaacctccgcgtaaacatgaaaaaccccgagtcttggttcggctcgggactttccatgtcctgattctgtatcaacagtttactcagtacaattgcaaaatagtgcaaatatttataaagttcacaaaaagttcacaaattatttttcttttggaagcagtcctgttttcaattcatcggatgaacgttcccagagcccttggtcatgcttctgcagaaattcagcaagcacctgctttgagctggcgtccattttgtccacgataatgcagcgcttcattgatttatccattaaattcacatgctccggcaatgacttatagcctctgcggatacttctgtccacggtcatttcacaagccgtcacacccgcgtaataagggccttcttcttttctgtcgatggtgacccacacgagccagtacggttttccgttcggcacttcatctttgttcggcaggaatttgatgcctttttcaacgacactgcgggcatgcatggcgccgatgtcaacgaaggcttccttctcttccacatcgacaaataccggagaaatattgtcaaggctcagcgccccggcgccaaaaccgccatgtccgtcggtcggatcacttttaataatattaaatccgattgttttcttctttttttcttccatgaaaataccctcctacaaaagcggttgaaatataatggcaaataccttgagaatccagtctctcccctcgcttaacagcggccacacgacataggagccgaccggtgtcacaaacagcacgagaaacacgataatcccgtagctctcaaactgagtcattttggcgcgcacccgcggcggcacgagatcctcaataatccggtagccgtcaagcggaggaagcggcagcaggttgaataaacacagcgcgagattcagctgaatccaaatagagaaaaagcggtcaagccccatgctgaatgcagaaagcagctccattccgtaagcatgcatcaacactagcaaaaagaaaccgataaaggcaagaagcaggttgcttacaggcccggcgacggaaaccagcactcccgccagccgcggtcttttaaaggcgcggcggttcaccggcaccggacgggcccagccgaaacccgcgaccaaaattagaatcgttccgaaaacatcaagatgtttaatcggattgagcgttaatctgccctgcctcgccgcggtatcgtctccgaaccgatacgcgacatacgcgtgcgccagttcatgcatcgtaaatgccacaatcagcgtaatcacgacatagggcataagctccagcggataatataaaaatctgtccaaatgtaaaaatccccttttttaaaaaatgcaagattgtccttcattcagtatactataagtgacctctcttccaaagagaggaaacgataaaggaggatcagcaccatgccgctcgtaaccgttaaaatgcttgaaggccgcacagatgaacaaaaacggaatctggttgaaaaagtgacagaagccgtaaaagaaacgacaggcgcagccgaagaaaagatcattgtcatgattgaagaaatgagaaaggatcattacgccgtcgccggcaaacggatcagcgatacggagtaatccttgataatggccggcgctgctatgtcaggccggcttatttcattactttttcaacgaggctgaaaaaggtattcttttcttcttctgtcaatgcttcgaacagctcgtcaatgagcatctgacggttttcaatcatttgcatggccgccatttttcccgattcggaaagcgtcatccataccgtgcgccggtcttcgttatttctcgacctttccacgaaaccctctttttctaaatgattcagagcggttgtcgtggctgaaggcgataatgtgacttcctgcaatatatctttaatcgtgcacgtgccgtgccggtaaataatcctgagaataaatcctctgatattgtttatactcttcggaattgtcgcctcatcaagctttttcgtgctctttaaatatttcgtgagcgcgtaatccagtacatttgcttgtaatatatcgtgcttcatgcagaaactccccatttcaagatgcatccatcatcattgtttgttttttattacattttactgataccttacggagaaagtcaaaattccggccggaaagcccacaacttttatcctgccctatacagactattatctcctgcttttttacccatcccttttatgcaatgctggttttatagacatgattcaggtaaaatcattaagggtgactgcgtttgacggaaaggataatctgatcggatgcggcagacaatatgactggaaaagaaacggaacagacggggaaacagaacacaggattgtcgattacacagaagatgtgacacgggtaaaagccaaagaggccctcttggcttttacttttggatggagggatgcgtgttgcggaatatcctacaaaaaaaagacatcacccagctgcttgaacaaagcagaaacaggcagactgccaaaacgatgggtggatttgatttaacattactgggcatcggcgccgtcatcgggacgggcgtcatggttcttacaggcattacggccgcgaaaaacgccgggccttccgtaatcttttcttttatcattgcagccgttgtctgcagccttgcagcattatgttacgccgaaatcgcttctgttctcccggtttacggaagtgcctatatttactcttacactaccatgggagaaattgtcggccatttaatgggctggacgctcttatccgtttatatggtgacggcgtcggcggtggcaagcggctggtcaagttattttaataatctgttagccgaaatcggcatgcctttgccggacagtctgctgcacgtgccgagccaggggggcatcgtcaaccttcctgccatcatcattactctattaattgccgtcgttctgtcacgcggctctaaagagagcaaaacctttaataatataatggttctcgtaaaaatcggaattgttttgctgtttatcatcacaggaagcttttttgtaaagccgggcaattggcatccttttatgccttttggaatcaaaggcgtcattacgggggcttctgccgtcttttttgcgtttctcggatttgacgcgatttccgcttcggctgaagaagtcaaaaaaccgcagcgcaacctgccgatcggtattatcggttcattggtgatctgtacatttgtatacgtcatcgtctgtctcgtcatgacgggtatggttccgtattcacagcttaatgtgccggaagccatgtcttatgtgttgcagtctgtcggacaaaacgcggtggcgggcgttatcgctgccggtgcggtgatcggactgatggccgtcgttctcgcccatacctatgcggcgacccgtatatcttttgcgatggcaagagacggaatgctgccgaaagtctttactattgtcggaaagaaatcgggagcgccgatctttaatacgtggctgatcggactgatcagcgcctgcatcgcgggttttgttgatctgaaagagctgtcagatctctcaaacatcggcgcattattgacattcgccatggtcagtctgtccgtgctgattctgcgccgcacccataaggatctgccacggggatttaaagtgccttttgtacccgtactgccgattttggccattatctgctgtttgtttttaatggtcaatctgccgctgaaaacgtggctttattttgccgtctggctgatcatcggcgtgatcgtttactttttatattcgtacaagcacagcaaattgagacaataaacaaaaccaggcccgctttatcgcggcctggttttttcatcaaaaaagacgaaagccatcgcctttaacaaatgtgtttcagctcttctatgtagtgaagcgcctcatcatattcttcatccgtatatttctgtttgctttttatcgtaaacactttctctttcttttcctcagcttcaaggccgtcaaaatacaaaatcgtagacaccagctccaaaaaccgggatgagcggctgttgacgctgtcgatgtacttcttcatatccggcatcgtaagctccgcatgatgtaaaaactcggctcccgtctccgtcagcgagtaccggtattgaaagtagccgccctttttttccttcacctcatccagaaacccaagattgcacagctcttcaattcgaagcgtcagttcttcggaatacgggccgtaaaaatgaaaatcatatttttcgtagaaaggatactgcattttcttcgcgatataaatgattttctgcagctttttccgcccgatgatttctccagaatccgagaacaccttcatcagttttgcatgttctttcaacaaattcccgacatctccttttccttctttaccaaaatccttctatgtcagtcccagcagctgccggatttttaattttgcttcagggttttctgaatcgtcacaaatgaggtccatcggatagtagagcttatggtccgtccggcgtttgcccgaaatggattcgacaatggcggactgcctggacagctctttgatctggccgttctgcgttaacaggtgaatcggcagacgctcctcctcttcacccggccggtaaaaatcatacggcagatccgatgaagaatcgaccactaaatagtaattgggatcaattcccgcctctttaaacagagcggtcagttcaaaataagccgacatttcctcattggggttaaattcggcatattgaaacagctggcggttaatgaagcggcggcacaagtcggacagaatcgggtcctcttcttcttcccaagcctggaaataatataaaatgatggcttcatcaagcttcagataatccgcaagcgtcagcttcccttcaaaaatggaataaaaatgaacgggagcatgagtgaagatatacccttcttcatggagctgcttcgcacggtggagaattttcgtcaaaatgacttcagcgcttctcgtcacgggatgaaaatacacctgccagtacatttgatagcggctcataatatagtcttcgacggcgtgcatgccgctttgcttaatgacgatttggtcctctcgcggacgcatcacccttaaaatccgttccatatcaaaatgtccgtagctgacgcccgtatagtatgcgtcccgctgaaggtaatccatcctgtcggcgtcaatctggctcgaaatcaggctgaccacctgtttgtttttgtatgttttggcaatgacttcggcaacatcctgcggaaatcccggtcccgcctttctgagaacctgattcacctcggtgtcgccgagaatgatttccctcgtatagtcttcatgatccagatgaaaaaccttttcaaaggaatgcgaaaacggcccatgtcccaaatcgtgcaaaagcgcggcgctgagacagagttcgcgttcattgtcatcccattcaggacgccctttaaaaacatcatcaaccattcgtctgacaatctcatagacgccgagagaatggttaaaacggctgtgttccgcgccgtgaaacgtcaaatacgtcgtaccgagctgtttgatccggcgcagccgctgaaattcacgggtgccgatcaaatcccagatcagcttgtcccgcacatgaacatagcggtgaacgggatctttaaacactttttcttctgataattttccgtttggatacgccatcgtcattccctcttttttttagccgtgattctattatatcggctctgtaatttgaaaacatccttgaatttgtccggcgttttgttccagtattccgtcattgattttttgaagcaaaaaagcctgacccgtcgggcgaggctgtcgtaaaatacacatttactttttgatcttctttttcactttctcaatcagctcatcctcagtcggcgccgacagcgggcggttgtttacgaaagcaaacgattttttgcgtccgggcccgcaatatgactgacatccgacctccacttttgcatccgggtcagcttctttcaaacgcggcagcaaagtcttaatattggtggcctggcaatcatcacacactcggaattcattagccatgatgtacgcttcccttcattcaatgttcctctatgttaaatcttaattttaaaaacgaaaaaaatcacatcacatctcattgtacaaggattcatcttatcctgcaaggctctgcgtatctctcattctttcagccaatttgtataaatattttccaatctggacattctaataccatcaaagatattgggggttgagaacattgacaaaacaaagacaggacgcctggtcggaggaaaacgacctgctgcttgcggaaaccgtgctccggcacgtccgggaaggaagcacgcagctgaacgcctttgaagaggtaggcgataaattaaacagaacgtcggcagcgtgcggtttcagatggaatgccgtcgtgcgccatcaatacgaaaaagcgcttcagcttgccaaaaaacagcggaaacagcggatgcgcgcgctcggaaacggccagccggccaagaagaaactattatatcagccgcctgcgccggatgcggacatcatgcaggaaaccgcagccgaagagacggttcaaacggaagcgccaaaagaggatcggcaagccgtcatgtccggcgaacatatgccttatgtcgatgaaagcttcaaggaagagttagctagtttatcacatttgctggcgcctcagcagccgagccaaaaggcggagctcacaatggcagacgtcattcaatttctgcagagctatgaaggcagcggaaagcaaacttccgccctgcaaatggaaaatgaccgtttaaaacgggaaaaccaagaacttcagtctaaaaccgagcagctggaagcggccgtcgaaaagcttgaaaaagatcaaaaaaccattcaggaagactacgaaaccttggtgaaaattatgaacagagccagaaaactagttttatttgaagacgacgaacatgcctctccgtccttcaaaatggaccggaacggcaatttagaaaaaatggccgaataactcaaaaaacccctttccttgtcatggaaaaaggggtttttgccatttgtcaatgacgcgcatcctgatctatattaatgtaaacattgttcaggaggccttcttcccgcaagggctgcacatctcggtccccgcccgcacataagcataaagattcaattcctcatcccaaatggttcttgggaattattgatcgattagctactgtgcaatacactgtatagagaatacaattattagatatgatgggaatgatagtaaatgagtagccaattacgaaaaggagcgttggaactttgtgtgttgtccctgcttctttatgaagatttatatggttatgaattaatcaagatcataagtgaaacgttccctgtatcggagggcaccatctaccccatattacgaagactcacaaaaaataactacctaaaaacgtatacagcagcttccgatcaaggcccatcacgcaaatattacaaagtaacagaagaaggcgccttatatcatcacacattaaaatcggaatggcttgacctgtccgaaaaagtgaacagcatcattaaggagggaaaatgaatgtgtaaagaccaatatttaaaacatctccggcgggaaataaaagatctgccggaacttgagcaaaaagagatactcgccgatatcggcgaaatattccaaatgggcggcgctgaaggaaaaagcgatgaacaaatcgccggcaatttaggaaaccccaaaacacttgcgcgcgccttaaaagcggatattttcatcagtgatgccgaggagcagaaaacatggcgctcctttttcaaagcattcggcctgatgctggggatgggcatgttcaacttcatgtttatgctgacaccgtttctttttgcctctgttgcggtgttaagtttgatggcgatcggtctgatgctgatgaccggatcattctttctcctcgtaaaagtgccgattataacagccatttttaacggatgtatggttcttggagcgggtatggcggtgtttatggccggatttgatctttcgaaactgatattccgcatctttttgcgctatttcaaatggaatgtcagcgttgtaaggagggaaaccattgaatcgaaaaatgtggtatagcattgctctcattttaatcgctgccggcctgatcggaagcatgttcttcggttttgacggcttttaccctaaatcataaggaaggtgtgcaaatatcatgactgaaccagccctgatattaaaagatgtctctaaaacaatcaatcatacccctattgtacagtcaatttctttcgatgtgagaaaaggcgagatcttcggccttttagggccgaacggctcagggaaaaccactattttcagaatgatcgtacagcttattaaaaaaacagaaggagccatttcattcagaggcagaccggacagcgactttgaatattttatgagacatatcggggttatcattgaaggcccggatatgtatccgaatatgaccgctttgcaaaacctaaaatattttactaaactgcgcagcacctcgctgcgaacggatgaccttatgaatacccttgcaaaagtcgggctagagcaggctgcccgcaaaaaagtgaaacatttctcattaggtatgaaacagcgcttggggctcgcttattctcttcttcacaatcccggattattaattctggatgaaccgatgaacggcctcgatcctaaaggaatgaaagaattgcgcaccattctttccgatttatcgaagcaaggggtttctattttattatcgagccatttattgtcggaaatggaggagatttgcgatagggttgcctatattaaaaagggacggattttaggaattgaagacatgaagaacagacatgaccttggtcagaaaaaactgtttaccgtcacggtcgatcatccggcaagggcgaaagaaatattagagcaggacggtattcttcaagtacagcaaaaagacagccgcatcattgaattggaagcggaagaagataccatcccgtatgtcattaaatctttggcagagaaagagattctgatttcccgcgtttctgcaagaactttgtcattggaagagaaatacatgatgattacagatcaggaggacgcggtatgagcatatttcatctggcgcagaacgaattcataaaaataacccgaaaaaaaggcacacttttatctctttttttcctgtttctcatcgttttgctggccggccttattatgaatcatgagttagatgcttcctcggataacaattggaaagaacggcttctcgccgaaaaaaaacaggaagaaattgataaaccggctgaaacgacaggcgtttattattctgctgatgttaagaataaagactattatttggagcataacatcaacccctatgaatggaacggctggaggtttttcggcacggttacttcaaacgggcttgagattttcgtcagcttgaccgcgattttaaccgtcagcggggttgtttctaaagagtttgcccttgggacgattaagtttatcgctacaagcccgaaccgaagatggcggattttaacatcgaaatttctggcgtctcttctgtttaccggcatggtttacttattttactgtgtgagctgtttgctgatcggcggcgtgttattcggtttttccaatgcttcatatccgctcgtctatactcatttaaatgacagtctgtataccatcagttcaatcaaagcatccggaatcattctgcttttgcgtttcatatcaattataagcattgtcaccattgcgttcactttgtcagtattgtgcaaaagccaggcgctctccctttgcttatcgattttactgctgtttgccggcagtatattgggcggaactgatttgcttgcccaatttacgtggtataaatttacgctctttccgcatttaaatctcgttgcttatgtaaataaaagcgcgggtgatgcgatttcaacgttaaacatcccctattccatgacggttatagcgatctactttcttatttgtttattgatttctttttctgtctttcaaaagagagacattacagcatagacagagaggcggcggcataatgagcggacggcaggaaatactgccagtccagtaatttgccgctggccgccccttggtccatcgctaacggattcaaataaccgaagctcccgctgcttcgctgctgaaagcgtagaaattcccgcccttcccgtataaaaagcgcctcatcgaattggagaaattccataatggctgtgtattttgcaacggcgtcaatgtgatactttctgcactcggctaacattaaacctgaaaaagcaaagtctgatgttttgtaccattccgtgagaaaaggctgcaattcattcatttgcaaataagtgacggcataaagggcatccgcctgttcttgctggatgccgcccggcgccatgagcaaatcggcctcacgtttcatcccggtttctaagaacacgatcagttcttccggagtcaccgccccaaaataagcccctaacaccatgaggatcatagaggagggctctgatttcagttcctcttgtaaaccgcgggccatttgttcaagtccgttatgaaaaaagatgctttttgcggcatctatcctgcggtacacatgatacgcatacgcgaacaggactggatggcattcgtgtgttttttctccgaaataacggtctaggaatagaataacttcttctgtatcctttctgctttcaaaatgatgacatgccgctaaaccgcaaaacaggtgcatgagatcatctgcttccatttcttccggctgcagctgaatgttcttccaaaaacccagcagccattcttctgttttttttatattaaaatgttccttgactatctgcatgttccacactccagattcagaatctcaatcgccggcagaagagccggagcacaatgaatggatggattctcgttatttatttgatgaagagccgcttgacagccataaaaaaatggatcgatacacgattggataaataacatattgcacagctgtttcatttttcggctgccgagacaaaacacaagccatttttgaatggacactttcaagccgggatgaagcagatgctctccctcattcaaatgaagaagacagtactcgacaaactccagctcgttttcagctgttcttttccatgcgtcatggagcaaaggctgaaacatcgaattcttgtaaaagcgcactttttcatggtcagttgacattcccagctcgctcagcaaaccgacaaattcggcgtatttaaaataaggccattctttttttataagatagccgttttgcaatccgtgacgtatgacctgatcatccgaatccattccctgcttctttttataagcttttgccgttaaatagatatgaatcaactcattgacaatggccgtgttacagtgaaacagatcttcccagcatgacttatcaacgaaagcggaggcaatcctttcagtatgttcttttacagcggaagaatggctcgtcttcctgtagtacttgcagaagccggcaaacagctgaatgctcttttgatccggaagcgattgttcagcaaaagataataaaaattgatctgtctcttcagctaatctattcaagttaatcgttcctttctgccctaagacaggcatgcgcggcgccagcggcgacaagtgttgtatgatagcaatgtttgaacacatcttctcttcgctgttcacctttcaaaccgggtttatgttgataggtgatgctcgggacattcccctctttcattcggccctgatagattttattccaggctgcttcataaagcggtttatggttgtccttatccatgttgatatgtaaaaaagagctgcacatcaataattcactggtaatatctaaattctcaagacagatatagatcccgagaaatttcaggaccttttcttttaacgacggcagatgatactctttatccgtaagcgaagaacatcccatgtctgttatataaaaaatcgtatgagtgatgctgtacgcatcatgatccgtcatatatgtatttgggatatcctgaccagctgctgtgtagtgatataagtcagaaaaatccgttatttccgaggttacgcctgctctttgcagactgtacttcagatccattttccgaaagggaactttagcaaggctgcaatcaaaacgcgctgccgtgaatttttccagctcccatatcaccgaagcccgtgacggatgatcagtcaaggtaagaaattcacccgcaatagccaatccagcgagaccgtccggatcaaaatgaataaattcttcaagctgatcattacggagcctttctgtaataaactccgttaaaacagcaacttccttatcatctgcctgatttctgatcaggtaattggtaagaaaaatgagttctataaatgttttaaggcgccacctgaaatcatttgctactttatgattcatatcgaaataatggatatttttaacaatccatgacagtgctccccgcttaatttctgttatatactcttgtgtcaaactctcaccgcctcgtctcagatgtgtaggctccaaacagtgattatcctacttttgagcggctaaatcagagaaattcaaattcgggttttgattgtcttcttggctcggcactacaagcacccagccgctccaagcgaaagaattgcctgattgttccgcatctccggctaacaaatgtgtcgggatcgtgattcttttttcttcttttatttttttaaagttcatatctccatctcctttagtttatagaattatttggaacctacataaatatattaatcaaataaggtatataatgtaaactagttttgatataacgattcttattcactataactaaatagtatataattaccaaaaacaaaaaaacccggacttagtccaagctttcctgcgtgccgaacaccttctcattccgttccagcattcgggtcagatttttttcaaataccatttcctcttccggcgataatccggctgcatacaggcgtccgctgagttccttcagttcagtcaaaagcgccagcattaagtcttgcacggtaatgtccgtttgcagcaattcgcttaatgaagccatcgtttcgggccggatatcgggatatacgccttttgtatcgttgcttttgtcttttaaagcggcttgatagaaacgtctgatcagatcggcgcgttcgcttccgcttttatcggcgcagaggtaaatctgaaccgcggttccgccccgcaggcgtctttgtgagattcccgcgaattttcggccgccgatgctgagatcatagctgcccgggcagtacgatcctttaatttcatatgcttcaatttcggcatggtgcggacgcagcatccgccgcaccagctctgtcatcgcctcgtagcctctgtcgatgtcgatgccttttttctcgtcttcaaaaataagcgagatattcaatacgccttcgtccagtacgacggcgaggcctccggaattgcggacaatgacacggtagccttcgtcctccagcaatttcacgccgtcctctaaaaacggcaggcgcgtgtcctgaatgccgagcacgatcgtccggtggtgcacccaagagcgtgccgtcgcaggcgattcccctttgcctacggaggcgcacagcgtatcatccattgcgaatgactgcttcgcatcaaaataagggccgaggctggattggtcaatgattctccagctcggctgcatcagtaaatcaatcggttgctttcccatctattttaaatccctttcgtcataggctttccatgcatttattatatcactccgcttgtgatgattgaaattggctgttcaatagagcgatgaagatttctttgttttttgtgttctccataatggaagattggatgatagacagtttccgttttaaggagaatccttttatctcaagcacggaaatgctgccgtgaagcagatccttttgcagcacgctttttgacagaacggaaagacccattccgctgatcacggcttctttgacgccctggttgctgctgatcgtcatcatggatttcggccgcagtccgtttgattgaagaacgtggtctaaatattccctcgttcccgaacccttctccctcgtcacccatgcttgattttgcaattcggcagccgggatgttttttctgccggcgagcgggtgtccgttcggtgcggcaatgcacaattcatcctccataaacggctgaatgtccagctcgtttttccccgtatgcccttcaattaatccgatatcggcttgaagcatccgaaccgcttcgctgacctcctccgtgtttccgatcatgacgtccaggttcagctcgggatactcgtcatgaagctttgcgagaagcggcggcagaatatattcgccgatggtaaagctcgcggcgattttgagcttccctttgacataatgatgatgggcgtaaatttcggatttcgcctgttcgtacaaaaagaccatctgcttggcgcgctgatagagaatgtcccccgtcggtgtagtcgtaaagtgcttcggagagcggttcagcaaggcggtttgaaattctttctccaggtttttaatgtgaaggctgacgcttggctgagaaatcatcagcttctgcgccgcctttgtaaagtttttttcttccacgacggcaatgaatgttttcagttccccataatacaaaaagcatcgcccctaatcattatttttcctaatcatttagatcatataaatatattttactaatgattaagaccgcagtaaagtggagttatcaagataatgggaagtgactgagatgaagatggtaaaaggtgtttcagttaccgcaggaattgcgtttgcggctttctatgtcagccgcctgccgttttttcatatgttcggaatgcttgtccttgcaatgctgatcggcatgctctggcgcgccgtattcggacagcgggcggcattagagccggggatcgcgttctcaggcaaatacttgctgaaagcaggcatcatcctgcttggcatgagactgaatctggcggatatctatcatgcgggctggcacgtatttgcaattgccgtctgctgtatgatgtttgcgggtgccgttgtatacggactgtcccggctgttccgtatagatcagacactcagcacgctgacagcctgcggcacagcgatctgcggagcggctgccattgccgcgatcgcgccgcagatcagatcaaatgaaaatgcagccgccatcagcgcggccgccgtttcgttattaggaaccgtttttactgttgtatattctcttgcttatcatggattgagcttttctcctgcggcttacggagccttttgcggggcaacgcttcacgaggtggcgcatgcggcggcggccggcagcgccggaggaaaagcagccgtcgagatggcggtgatcgtcaaactgacccgggtcgcgctgctcgtcccggccgcattcatgctcggattgcgggcgcgccgcagcggaaagtcaaagacggcttctgccgcttcgctccccatcccctggtttatcttcggatttctcggaatgagcgccatccatacatcaggcgttatttcagcctcgttttccgcgtttcttgttcaagtgtcttatgttttcatcggcatggcgatggcgggtctcggtttgaaagtccatatatcggcgtttcgtcataacggctggcgggcgctcgcagcaggcttgatcggttctctctgtttgtccctgttcggctgggccgcagtgacgttttttctataaaaaaagccggccctcataaaggccggcttttgcggattacagcgcttgagcagccgtaattaacgcaagattgtagacgtcttccgcattacatcctctggaaagatcgtttacaggcatatttaatccttgcagaatcggtccgaccgcttcaaagccgcctaagcgctgagcgattttgtagccgatgtttcctgcttcaaggcttgggaatacaaatacattcgcgtctcctttaatgtcggagtccggcgcttttttctccgcgacagacggcacaaatgcagcgtcgaattggaattcgccgtcaagcgtaagctcaggcgctttttccttcgcaattttcaccgcttcagccactttgtccgtctcgtctgatttcgccgatccttttgtagagaagctgagcatggcaacgcgcgggtcaatgtcaaacatttgagccgtattggcgctttcaatggcgatttcggcaaggtcctgactgtcaggagcaatgttgatcgcgcaatcagcgaacacatactgctcgtcaccgcgggccatgatgaagacgcctgatgtttttttcacgccttcttttgttttgatgatttgcagtgcagggcgcaccgtatcagcagtagaatgtgcagctccgctgacaagtccgtctgcgagacctttgtacacaagcatcgtgccgaaatagttttcgtccagcaaagctttgcgggcctgttcttccgtcgctttgcctttgcggcgttctacgaaagcctgaacgagttcttccatgccttcatatgtatgcgggtcaaaaatgtccacgccgtcaagcgtaagatttaattctttcgcttttgcttgaatgtcttctttattgccgactacgatcggctttaataccttgttgcccgccaagttgttgaccgcaaccaggatacgttcgtccaacccttcaggaaatacgattttcacatcttttcctgcgactttttcttgtacttttgtaaataaatctgccacgatataccctcctctatgttgacaaaaaacgcttacttttacagcatactcttcttccagctaaattcaaataaccaacttctattatagcgctttcaaaaagaaatcttatttttctaactaatttaattgaccgtttgttcacggcatagtttctgacacaaggcttcggattattcaaggtttctccacagccgaaacggttaaactgtgatatagtgaaggcatcaatgtaatgaaaagatataggagtgaagatacatgagtgagcagcaaaaaacgaacgaagccgcccaaacgcttgacggctggtacgcgcttcacgatttccgcacaatggactggacgtcatggaagatgttatccagcgatgagcgcctgtcgattattcacgaatttacgggactgcttgaaaaatggggcgtcgcccaaaaagaaggcaaaggctctcaaaccatctacagcatcgtcggacagaaagctgattttatgctgatgattcttcgcccgacaatggaagagctgaacgaaatcgagcttgaatttaacaaatcaaagcttgctgaatttacaatcccggcttattcttacgtgtccgtggttgagctgagcaactacctcgcaagcggagaaggcgatccttatgaaaatccgcatgtccgcgcccgcctgtatcctgagctgccggaagcgaaatacgtctgcttctatccgatggataaaagaagaagcggcaatgacaactggtacatgctttctatggatgaacgcagaaacctgatgagaagccacggcttgatcggacgaagctatgccggcaaagtcaaacagattatcacgggatctgtcggttttgacgattacgaatggggcgtcacgctcttcagcgatgatgtgcttcagttcaaaaaacttgtttacgaaatgcgctttgatgaagtcagcgcgcgctacggcgaattcggttcattttttgtcggaaaccgcttgtctctcgacacgcttccgaagtttttgcacgtgtaataagttgttaaagcctgattttaaaaatcaggcttttttcaaaaaactattgacaaaatattgaacctaatgtaaagtttactttacgtaaagcgcactttacttactgagcaattgttgtatcgaaatgaggtgaaatatgagtgaaaaatcggttaaaagaaattagacagaggcattcttattcacaggaaacgttagccttgaaattaaaagtgtccagacaaaccatcatttcaattgagaatgggaaatataatccctccctgcccttagctttgaaaatagcaaagattttcaaggaaagtgtagagaatatatttttgttagaggaggaatagaaatgaagaagaacttttttttaatatcttttgtttttttcattatcgtctcgggagcttttatagcactatcaatatttacgcaaacaaaattaccttcaataacttttcccatcttaactctttcaataataagctttgttctatgggctaccttcccatcattaccattaaaaagagatgaacgaggaaagtttataatacagaagagcttagcctatacttttatgctaaccttaatttatcttttcattttcttgacaatattttattttaatttaatcaacctagacaaagaacagattttactcttattttcctcgttagttataagtacagcatttatatcgatcctcattctaaataagaaatactaacaattaatactgaaagttagttaaattaattcttttttgaaagcttttactattattccaactcgagaacgtacatttaactttttacgtatttttgctatatgatattcaatagctctttgagaataacctaattgttcagctatttctatattggatttttctttagctattagatcaatgatttcactctctgttttcgttatattgttcacctttgaaaacccctttaaaacaaaatctttggaaccacgctaccatacattaggtccctttatttataatttaaaaacgattgactgagcccaatatttacttgatctttataaaaaattagcaggggattgccctgctaattttacaaatttaaaatttacttttacatcgtccataacaaactcctattacagaaccagttgcaacatcagctgccaacagacaagcatagcaaccagcaccagcagtgctagcacaagcaacaccacatagtgtggctaatgcagcgattgcccacgaagcaaccccttgtcccgataaacaagaattaaagcagttccaccattgcttaaacccctgagaagacatgttttttgttaaatcaactttttcaccattgtctttaataacaaaacctgattcaacttctccagatttattaatttcagcattataaatgagttttttatttttaatcacctttgaagcaactttcccagatttctcccttacaccaaataaagagtagtcttctataattttaccattttcatctagtataacgataaaattgctatctttttcgacgttttctccttttaaaggataatatgcataataaagcgttttatttccataattatcaactttcatcatatgtcttttgctgttatcaaactttatgtttttgctgtacttcttcatcaacgccagtttttcatctttttttccccaatctttaatccagtcatcaatttttaatgtttcagatttggatgctctacttaatttttcatctcctggctcataatccgctgatgcaaaattaggcaatatacacgaaattgccaataagattgataaagtcaacagtaggtagtgctttgcatcccaaatttttttaatcatatgatctctccctttcctttttttgtaatcataatataaaaaaattgcggttaaccgaaaatatttatatattcaatatttccttaagattaagtacaaagaacttgggatcaaaaacaaaacctctctgaaaatcgttgaataaccaatagtttctgcgtttccattaccaaaacaaccacaaccatacggaaaatatctaccgaaattagctattaacagaataagaaatattgtgattaacagtttataaaatattacaaaaaaatatcgaaatcgtttcacccagatcaaaaacgcaatcattatttcaataatggggactgcaaaccctactattagatacattgactcgggtatgtattgataatattgtagtgaaaatataaaactatatacgtcaaataatttcataaaaccagaatacagcattattattgatatgattgctacggatacatgctcaactttccgaattaaaaaagtttttatatttattcttagtctgttccccttcaattctattagtttcccttccatttttataaacgactaatgtcggtgtttgatttatcttataactttcccaagatttttgatcaccttcgatgtttaatataaggaattttccgtttattctctctcccatcggaataagatatggtgaaacccttttacaatgaagacaatttatttgataatagtatacaaatacgtgattttgatcttttattgcatttctcacttcatttgtagtagcctgcccagcatataaattatcttttttttgatagatatttgatgcaactgctatcaatgaacaaaatattataaggattgatattacaataattatgcgctccttttttttcattaaaactaacctcctttttaattttttattctctttcccggtttgttttttgaatattttatatgctaacgtaaggattctttttataaaagggtattttttaccatttcatatattatttcaaaattgattctatactgattaatgaaatttttatttcaactaaggttaagttcacttattattttttctttaccagaatttaaataaaatttgctatttttatcatttttttttacgatgtaaaggagattccattttggtaaaggggtgcagacagttgtcaaaacgaaccgcgtttattatgggagccagtcaggggatcggcaaagcgatcgctctgaaactggcggacaatggctttcataccgtcattaattcacgagttcccgaaaatatcgaatcggtaaaagaagagatcctcgccaaacatccggatgcgggcgtcaccgttctggccggggatatgtcggaccagaagacaagagccggcatttttgaagagatcagatcacaatgcggacggcttgatgtattgatcaacaacattccgggcggctcgccggatacctttgaaaactgcgatatagaggatatgacaaatacctttacgaataaaacgatcgcctatatcgactctatgaaaacggccgcagcaatcatgaaacagcacgaattcggcagaatcattaatatcgtcggaaacctatggaaagaacccggcgccaatatgtttaccaacagcatgatgaacgccgctttaattaatgccagcaaaaacatcgccattcagcttgcgccttttcacattactgtcaactgtctgaatcccgggtttatcgccacagaccgttatcaccaattcgtgaagaatgtcatgaagcaaaacggcatttctaaagcggaagcggaagaacggattgcctcaggcgtcccgatgaagcgtgtcggaactgcggaagaaaccgcggcgctggctgcctttcttgcctctgaagaagcctcctatattaccggacagcaagtatcagccgacggcggcagcatgaaaagcatataataaaaacatcccgctctcagcgggatgtttcttgtaatgaaggaaaggacaaaccgagcttttgaatccgcagcacgaattcccttaaatcaccctgttttgccaccattgatattctgacataacgctttccgccgctgccgaaaatctcgccgggcgtcacgacaacatgggcatgctccagcaaatagtccgaaaactggtgtgaagactcgaattcattcggaatttcagcccatacataaaaagtccctttcggtttttcaatgctccagcctaattccttttcacataacgccgtgaaaaagtcaatccgttctttatatgtgcgcttcagacgctcggtatgctcaggatttcctgacagcgccgccgctgccgcctgctgaagaccgccgaacatgccgacgaagacgtgatcctgaaactcattgaccgcctgaatgattttctcattccccacggcaaatgccattctccagcctgccatattgaaggttttcgaaaatgaataaagctccgcgccgaccgttttcgcttctttcgcctgaagaaagctggccggattctgatcaaattcgaacgcgccgtatgcaaaatcgtgaataaggtggatgtcatgtttttttgcaaacgctgccgctttttcataaaacgcctgatccgcagtcgcgcccgtcgggttattcgggtaattcaaaaacatcagcttggcttttttcaggacggcgggatcaatccgctcaaaatccggcaaatagccgttttccggatgaagcggcatctcatgcagctccgctctggccattgtaatgcccgataaatactcagggtagcctgggttcgggactaaggcgatatcgccgggattcagcaggcattgcgtcaaaacgtacaaaccagctttccctccgccgaacagcgcgacttctgtctccggattgaccgataccccgtactctctctcataaaattccgcgatggcttctttcagaaacggatagcctctgaacgggccgtatccgtgatacgaaggattcagcgcagcctcccgcaatgtttcaacgatatgcggcggtgtggggagatcgggattcccctgcccgagattaatgatctgggctcccgttttctccatctcttttaccttttgaaaaacgagcgaaaattcctgtttcggaagtgtcttgatgacgtcggacggtatgatttccatctgaaaggctccttataaatgaatttgctctgattcgttattccgttctgaaaaggatttattgaccagttttgtatgcagaaacagcccgctgaccaaaaggacgataaacgccatgatgactgccgcgtctacaatgttgatcagcatggaaccgacggcgatgcacaatccgatggaggcctccgccaccgaaaaaatccggccctgaatctggttcgccgcgttctcctgaactttgaccttcgccagcacctcaccgtattccattgcgataaagaaaagaatggcggcaatgactgacacggcgaaaatcggggtaaacaaaaacagcgcaagcgagacgatcgataacactgtaaaatacatcagccctttattgttgttaaagccccatttgctgacaagagcggcaccgataaagccgccaaagccgatacagaacgtcaggatgaaattgccgatttccccgtcgcctaaaaagcggctgacaatcgggaaatagctgtagacgacaccccacaaaagcgccatcgtaatcatcgtgaacatggcatttaacacaaaagcatttgttttgatttccttcaggccttctttaaacgactgaaaagcttctctcacgttttctgactgaatcggcacgtattgaagcttaatgcggctgatgaaaaacgcggagacaagataggtcaccccgttaaaggcgacggcaagctccacagaaccgcctaacagaaaaagtccgccggctgcagcgccgacaataatcgaaatcgtcgtggcttttgcaaacaaagtgttgatatttttaatatccgcttctaaagacgacatgaccgcgagacgtgccgggttaaaaaacacgccgcttccgtaagaaacaaacagcagcgccagaaaaagcagcggatattcgcctttcgggagaaatgtcagccccaaaaagatgacgcctctgatcacatccgtccacagcatgattttcaccctgtcgagccggtccacgagcacgcctaaaaacggctgaaacaccatcggaatactgcggaccgcgatgacgccggacgtcacccagtagtcgtgatagtatgtagacaaaatgagcagagccgggagaacgcaatagtctcccataaacgaaagcgcctgcccgaaaagcaaatacttagagttcggtttcagctgtttcataccggtaacgcatactttgcagtcagcttcgcctgctgctgaatttgtttgattgattcggccacgtcacccgaattgcttcctttcagctcgaacgccgcaatgctgttgaacgcttcgaacagccgcagatccacggatgtacccgcctcggccgccgagaaagaaacgatttcggtgtctccctttaagacgccgtcgggaatgtcaatgctttcaatgacgaaatcgacagccgtctcaggcagctggccgttctctttgaaatgctgaggatacaagtggcagtcggcgacatagcatggctcctgctccaataatcctttcggcagatcggcttcttttccgaaacagagaacatccaataacagctgcgccatatcgacgccgaagacctttttaatattcggaatcatgttccagcccgcaaatcgtgccgctgattcaatcagtccggcttcccggtttttcattaatttaatctctgtatgtgttgcgcagttttcgaggccgagtccttcattcgcctttttggctgcttcgacgattttccgcttcgcgtcatcatccaggatggacggcgtaatatgcgatgtctccgtgaatccgatttgcggtgttttatcatgaattgcgacagggaagtattctccgtcggccatgatgccttctatgctgatatagtcggaataaccgcttgtttcgtaccagtcgtcatactcgccctgcaaaaattcttccgcgataaacggcgcttcaaacgtgaccgctttcggtacgttgatcgacttcaggtattcattgactctgttaaattcggcttctgccgtttccatctctttgataagcgtcacgccgatggagctcgccagatatgtaggcttcagaatgagcggcgttccgatttcctgaagcgcggcgcggaaatcttccagcgtcgtcacccgtttgtttttgatagacttgacgccggcccggttgaaggcggctctcattttgtttttatctctggcattttcagcggcctgtatgcccgctcccctcaggccgagacgttcacacgcttttgccatcggagcgataaacagttcattgttggtcgtaatggcgtcaaccgcgaacatgccggccaccttgacgatttcttcgactacttcttcctcaggtttgtcatgatcttcatgagcccagtaaatcgaatcgggatgctcaaaatcagccagactcttaaaatagtctttatcttttatgaccgcgaccgagtatttttcaattaatgccgcatgagaggctgtaattgcaaaaggtctcggaataaagctgacgaggttgtatttttcggctgcgcttttgtaaaacatatgcggcgggcatcccccaaggtcagcgataaccaatactgtttttctctccatatgtaaacactccttctctattgtgcggtgtatccaccatctgcggtgatcgcgcttccggtcatatagcttgataaatccgacgcgagaaacagcatgacgttcgctatttcttcaggcttgccgagtctcagcagcggattgactttcgctttttcttttttgatttcttcaagcgtgccttcgttgttttcaaggaacgacttttcattcaaaggtgtgtcaatgattcccgggcacacgcaattgacgcggatgttgtgtttggcgtaatcgacggccatcgaacgcgtcagctgcaatacgccgcctttagaggcgttatatgcgggaatgtcgggccatgcaacgactcctccgacggagcacgtgttaatgatgttgcccttgccgcttttgagcatatacttgagcgcgtgcttgctcataagaaacatgcccgtcagattgacgttgagcaccttgttccaatcgctcagctccatctcatgaatcggcgcgacaatttcgatgccggcgttattgattaacacgtccaatccgccgaacttgtccgccgctgaccggatggcgttttgacatgccggctcatctgtaatatccgtctgcacaaaatgcagcctgtcattgttttctttcctgatcatcgcttctccctgcgcctcatcaatatccgcgacgaccacattcacctgctgattcagaaacgcctgaaccgcggcataaccgatgcctgatgcgccccctgtgatgaggacggttttatccgtcaggttcatgactctttcgcctctaattttttcgcttttgctctgttatagcgcggagggaaaaagatattgactgattttgaatctttttcaaatctgttgatggcgccgtgatcttctctcggatcgcagaaataagctgtgccgaatgtcatatccactttgcagccttcaatggtcatatcatagccgccgccgatgcagatgccgatttgttcattgcggtgtttatggaacggcatttctcccccgttgcccggaatgttggcaagcatgatttccacccagtcttccacgaagaacgtgacttccataccgggcaataagtctctcgttttaaaaatattcaaaaaataatcttcagggcttgtgtaggtttcaccggctttcaggcgtttaatatcaatggcgatcacttcttgatccgtctcatttcttgcgccgtgaggcacattaggaggcgcgatataggctgattccagcgctgtcatctttcttgtgacatctccgacagtcatggacagctcgccggaaacgacaaggccgatttggacttccttatgctgatgcggttccacgtttgtatgcggcggaacgtaagaaagcagaacttccgtatctcctctgacggacgaatattgtcttactccgttatcccattctattaatttaggcgtcgggaaataaagttcctgcaaatcttgttcagttttcatcatgaatctctccttttccgaataatgaccagctcatgggaatgcttttaaatgttttgacaaagtgaagaccgtacttttgtctggccagctcatttgtcagcgcgatgtcggacaaaccgtccttcactcttttcgcggctgcgctcgttgagttcaccagatcaaacgtgacatctttacgggtaaaatacttaatcaaattgataggagacgggtgggatacgatgacagtctgatcaagcatgtcatccgtatattcaaaaccgggccggacagccaggccgtacatcggggtgtcgcacctgaaaatttgcagaagctgcagatccggtctcatgtagaagtgcttaatgccgtcatacgcgtgaggcacaattgtgtattccagcggactttgaagcgttttttcaatgcacgattcaaatgtatcatgcagtgataatttgctgttcaccccttggagaagggtgaaattggtgatgaagttttttgctgcgtactcactgcttgtcccttcaggaccgagcgtgttgatcgtaatcagtttagatattgaataagccttgctttttgtttgaatgctattatccaatataatcatgagcaccaaccaatctgttaaattttaagtaaatattatccatagatgttcaagctgtcaatattatttgaaaatattgataattattcctatatattagaaaacaccctatgacatagggtgttaaaattaacatttataaaattatagaaactttattttaccgatacaatgtttggtcggcctgatgctcatatttcccatactttctgtatgcgaaaacgctgaggacaaagccgatgagggtgacggccgcacaaataaatccgacagctgcatatccgtatccgacatagaccggacccatgacagcagaacccaaggtgacggccaaattggacgccagactgtaaaatgccatgattttgccccggcggctctgtgagcaatcacttaaaatggtgctgagcaaggtcaccgtcaggctttgcatcaatccccagacgaataacccgatgaccaaaaacggcattgatgacggcgcataggcgagacaggaaagccatatgctgatcacggccaatgccgcgatcaaagagcgcattttccccgccttatctgcgatttttccggtgaacacgctcatggaaaaaccgattccgtacaccatgatcagcagccctgaagctgtattcccccccgacaggacgcggtgaagatatgtgccgagaaaggaatacatgccgtaaaaaccgatcatgttgcaaaaagtgatcgtgaggtatacagggacacggggcaccttcagcgcatcccggaaagtgcctgcctgctgtccgttttcctcttctgttttatccccatccgccgtgctgcggcgcgcctcaatgaaaatgagcgaagcaacgaggacagacatcatggcgaaaatccaaaacgtccaccgccaattcaaaacaccgccgataaaagagccgatcggaacaccgaaaatcaaagcgagcgaccagcttgacacgatcagacccatcaccttgccgcggtacgcataaggcacacggtcgccgaccaccgcatatgctgtcggcacaaacgcacccgccgcgagcccggaaagcgccctgcccagaaagaagaaaaagagattgtgcgccagcgcgcagatcaccgtgccggccgtaaatataagcagccccgccagcaggctgagttcccgggaatatttatctcccagcggaacgagaagcggcgccccgataaaaatcatcactccgtaaatactgatggaaagcgccagcacactgacatccgagctgaaagcctgcgctaaatccggaagcagcggagaaatcaccagctcttcagaaccggcggcaaatacgcctaatgtcaaagcaagcgcgagacagatcggaaatcggcgtttcgtttcgatgtgatcggtttgtttgctgttcatgctctttgaacacctcttccgtaaaacttttctaccttttgttgttttatagtttagcatccttatgtttcattttacatttcacatgaaaactaattccaattttttatttacattcagattttaaataaaatatttagtttgtattcaataaatgatataaaatacgccgtctggttatgctatagtgatagaatcatttgttaaggtgggggtcatggaatgaataacgctgattcaaaggccgcccgcgcaggcctcggcatggtactgattctcgggacgctcgcttcattcgggccgctttcgctcgatatgtatctgcccgctttgcctgaggtggcggccgatcttcatacgacagcgtcacttgcgcagctgagcctgacgttttgtcttttggggctggcggtcgggcagatcgttgtcgggccgctcagtgatatgatcgggcgccggaagccgctcattctgtcattgctgctttatacgctgtcttctttattatgcgccttcagcccttctgtttcgtttttaattgtcatgaggtttattcaaggattcaccggggcggccggaatcgtcatcgcacgggcgtccgcacgcgatatgtattccggaaaagaattgacggcttttttctcattactgatgctcgtcaatggggcggcaccgattttagcgccgattacagggggatttatccttcagttcgccggctggaaaatcgtatttgtcgtgctggcggtgatcggctgtatcatttctgccgccgtgcttacggcgttgcctgaatcactcccgccggaaaagcggacaagcggcggactccgggagacgctgatgacgtttcgcggcctgcttggcgaccggatgtttatgggatttgcgctcagccaggcatttgtgatgaccggcatgttcgcatatattgccggatcgccgtttgtactgcaaaacatctacggcgtatcggcgcaaatgttcagcctgctgttcgccgtaaacggtgcgggaatcatatgcgccactcaaatcaccggacggatggccaaaacacatgatgaacggaagctgtttgtctccgggctgttgatcgccgtcatcggaagcatcgctttgcttttatcacttgcgtttggttcaggcctgacggcggtctgcatttctttattcatcattgtttcttctgtcgggatcgtcacgacgacggggttttctctggctatgcagaaacaggagaaaggcgcgggaagcgctgcagctcttctcggactcctgccctttatcggcggtgcggctgccgctcccctggtcggtattgccggagaagaaaatgcctggccgatggccgtcagcattttcggttttcagttctgtgccgttctatcctatgtcctgtcggccaaacgaaaaacaaagtaaagcccgccgctttttgcggagggctttttttcttatccggcagcgcctttttccgaagaagccggctcacgcttcaggcgttttttaataccgaagtgataatacgcgtaacaaatgatcatcagcgggacgccgcagtacagaccgatacgctggtcggggataaaaatgagactgattaagataagaccgtaaaccgaaaatccgagaatcggcacgatcggataaagaggcgttttaaatgccaggtctttcagatttcctccttcagcgagaaagcgtctccggaaaacgaattgtgaagcgcagattgacatccacgcgacgacggtaatcataccggagatggaaatgagccacacatacaccgtttcagccgcgaatacacttgtcagcagggataaaccggagatagcgatggtgatggaaagagctttcagaggcacgccttttttcgtcagtttcgttaaggaagcggggcccatcttagtttttgatagggaccacatcattctggacgaagcgtacagcccggaattcgccaccgacagcatggcggtcagaatgacaaagttcatgatatcagccgcatagggaacgccgattttatccagcacagccacaaacgggctttcgatgacgcctgccgtttggtacggcaaaatggacacgagaacaaacatcgccagcacgaagaaaaacagcgtccgccatatgacgtttcggattgagcggggaagcgtcttttccggattttcgctttctcccgaggcgattccgaccagctcggtgccctggaatgaaaaattcaccatgacaagggtaaacagcacggcttgggcaccgttcgggaaaagccctttgtccgtcgtaaagtttgacagatacggagccgtctgcccgccgttaaaaccgacaaagccgaataccgcagcgcagccgagaataataaacaatacaatggccatgaccttaatgctggaaaaccaaaattccatttccgcaaaactccgcgcagacagcgcgttaatggaaaaaatgacgacgccgaatacaaggcaccacacccaaatcggaacggccggaaaccaccgctgcattaaaatccccgccgacgtcagttcaagccccactgtattggcccagctgaatgcgtacatccatccgatcgtaaaacccgtcgacggcccgagaaactttgcggcatacgcttgaaatgatcctgcgaccggcatggcgaccgcgagctcccccaaacaaagcatcaccagatacattaaaaatccgccgatcacataagccaatatcgcgccgatcggtcccgcttcactgatcgtaaaaccggagcccagaaaaagccccgtcccgatcacgccgccgagggcgatcataaacaaatgccggcccttcatcgtgcgctgcaattcagtttgattggtatctccctgcatatacatcctccttattccgttatgtcagccatttgtgcgtatgtctaatcggtagctgtgcaaaaggtgcattgtcgtctgctgaatgagctccggcagcacatggaatgtgtacggcttgtacacgcgttccgtccatttatggccgtcctttccgtatacccctatattgaccgacggaatattcaattccctgatttctttaaaaggaatcgtcccgatgacatcccagcccggaaaattatcggtaaaggcggagacctcctcgtctgtttcatgcagcgataaaaagcttccgtccgctaaataagggaaaaactttttaaagacgaatgtttctccggttgatgccgctgttttatcgaccgcttcttgaatgacatgctgcaagagccggtcccgtgtgctctcttctttcagataattgtgcggaaggtaaggcggcgcatagaaaataatgaccttggctccctgctcaggatcgagtttttgcagttcctcgacggctttaaagcatctcatccgcagttcaagatgttcatatgttttaaatgcctgctcgatacactgtgcagggtctatcccgcggcttctaagccttttcaggtaatcttccagactgtacacttgaacgttccatgacatctcttttttcggcaggctcgttctctcacagtattcgtcgtaataatcagataattttcgttctgtctctttgcaagcttcgtcagtcacggcggtcagctgatccatgacttctttggcggttttctcgtaaataaaataattaaaatagacatagctgctgacggcggtctgcacgttatacgcttccttgttgtcacgctggtacaggcaggtcggcggaagcacaagctccccttcaatgttttccgccatatgaatattgttgtgaattcttctggtgatttctgatgcgatcaaattcggatcgatgccggacagcgtatcaccgacatgcacctcccgcccgtaaatcgcaaagcaaggcaaaagcttccctgccgcgcccgtgtagatgtaccttgtcgtgtcaccctcatacagcggggtgataaaatcgttattaatcgctgctaaataacgaagctgcttttcttgtttcagccgttttaattcagaaatgctggttaaaatgccggaatgctggctttcttcatcggggtttgccatgaacagaatatggcccggcagctgatcgcgccgttcagaaaagtgaagcagattggcgagatgaacggcaataccgctctgcatatcaaccgaaccccttccgaacatccactcgcctgagcgggcgtcccgctgcacatcccgatcaaattcatagtttgagaaatactccgcgagacggtcggaatcaaaagcgatatcttttaaagggccgaaatcctcgatgccgaccgtatcaagatgagcgtgataaatgaccgtattcaggctttcgccgtttccctcaataaatgcgaaaatatttttgcggccgtaagggtcctcaggaatcgcctgctcccacacatgtgacggattctcctgaaagtagggaaagctcttgatcatatctttgatatagtcggctttttttccttctcccaatgtgccgttgatgctgtttaacgccaccagtgatttcgtaatggcttctattttctcctccggaagcattttgctgagctgctgatacatgttccatcctccttaccttcatatagagaaaatagcgcgactctctttttcatcgcgctatttccgaaagattaataggcttcagacgttgtttttgcctgcatatgaagaatcagatagtcaggtcctccggcttttgaatcggttcctgacatattgaagccgccgaacggctggtatccgacaatcgctcccgtacatccgcggttgaagtatagattcccgacgtgaaaatcttcgcgggcgcgttcaatgtgcgcacgggttttcgataacagagcgcccgtcagtccgtaatcggtattattggcaatctcaagcatatggtcgaaatcacgggcttttgagatcgcgacgaccggcccgaaaatttcctcctgcatcaggcgggcgttttcatcaacatccgcaaaaatggtcggctgaataaagtatccttttgaatcatcaccttcgcctcccgtcaggagttttccttctgttttgccgatttcgatataattcatgactttattataagatgcttcgtggataactggccccatgtatgtatcaaaatcttccggacttccgacggtgagtgattttgttaaagcgacggctttttcaacaacttcatcatagacgtcctgatggatgaccgcacgggaaccggctgaacatttttggcctgagaatccgaaggcggaatacacgattgaggaagcggcaaggtcaagatcagcatctctgtctacaagcaccgtatctttccctcccatttcggcaatgacccgtttcagccacttttggcccggctgtacttttgcggcgcgttcataaatacggcatccaaccgcgcgggaacctgtaaacgacacaaatctcgtcttcggatgctcaaccagatagtcgccgatttctcctccgtcgcccggtatgaattggagcacgccgtccggcaggcccgcttctttcatcacttcaacgaatttcgccgccacgacaggcgccgcatccgccggtttcagcagtatcgtgttgcctgttacgatggctgccgccgccgttcccgccataatcgcaagcgggaagttgaatggagagatgacgatccccaccccaagcggctcatagtgatactgattatattctccgtcacggctctttacaggggaaccgtctttcagtttcagcatctgacgggcgtaatactctaaaaagtcgatcgcttccgccgtatccgcatccgcttccttccacggttttccggcttctttcactagatacgcggagaattcgtgctttcttctgcggatgatcgccgccgctttaaacagcacattcgcgcggtgttccggccgtacttttttccatgtttgaaatgcctgcagcgcagcctgcatggccttttccgcaagttcttttccggcggccgatacagaaccgatcacttcttttttatctgccggattgacggaaatgatctttttatccgtttcaatcgcttcaccgttgatgataagcggataatgcttgccgagctgtgaattcacataagccagcgcttcctgaaacgattgtttatttgtctcttcctgaaaatttgtaaatggttcgtgtgcgtatgaaactgtcattagaattcctccccgtattttgtaatgtgtgctcacgctttataagatgcaagaagcataccagcatagcaatttgtgataaaaataagaaaatctttgccgaaagcggacgaagcttgtccgaatctgtcagctgcaatctgaaaacgcaaagaaattttgcgatccgctatataactgatgcaaaatctctttgcggataacacttatacccagccgcggaaacgggccgcttcagccgactttctgatgcccgtcatataggcggccaaacgcatatcgactttgtgggtatgcgctgtctgataaatggattcaaacgaattcaccatgacgctgcgcagttttccggcgacttcctcctcagaccagtaaaagccttgattattttgcacccattcaaaataagacaccgtcacgccgccggcgcttgccaaaatatccggcacgagaagcacgcctctttcattcagaattttcgtggcatctatcgttgtcgggccgtttgccgcctccacaatgattgaggctttaatgtgatgggcgttttcagccgtaatctgattggagattgcggcgggcacgagaatatcacagtccttttccagcagctccctgttcgttatgacatccgagaagagattcgtcaccgtgccgaagctgtcccgcttatccagcaagtaatcaatgtcaaggccgtcagggtcatacaaagcgccgtgggcgtctgagatgccgatcaccttggcgccggcgtcatgcataaatttagcgagaaagctccccgcatttccgaacccctgaatgatgatccgcgcattttccaatggaatcccttttttcttaacggcttcctcaatacaaatcgtgacgccttgcgcggtcgccgtctcccgcccctgtgaaccgccgagaacgatcggtttgcccgtaatgaatcccggtgaatcaaattctctcaggcggctgtattcgtccatcatccatgccataatctgcgagttggtatatacgtcgggagccggaatatcctttgtcggaccgacgatctggctgatcgcacgcacatatccgcggctcagccgttccagctctccgaatgacatcgtccgcggatcacagatgatgccgccttttccgcccccgtaaggaagatttgtgatgccgcattttaaagtcatccagatggaaagcgccttaacctcttcttcactgacttccggatgaaaccgcacgcccccttttgtcgggccgactgcgtcattatgctgtgagcggtagcccgtgaaaacctgtactgagccattgtccattttgacagggatgcggacggttaaaagccgcatcggctctttcatcagttcatacatattgtcagggtatcccagttttcgcagggcctcttttatgatcgattgtgttgacaagaacaaattaagaacttctttttcttcatctttctgattgcttttagaaatcgggttggctgacatgttttatcacctcatcgtattttacgtgtaagcttcaattaccggcagaacaaaatgtaagcgcttttacaccaaaacccatcaatccctttcacattgtcgttacgcccctttttatatgcaagattcatgccaggtttttgcttataaaaaaaagagactgttgtcagcctctcagattaaagagaaaggggatttgaagacgtatacagaagaaaccttactgcttttattaaaatttaatacgtcttaaacgtacagaaaacgttgtttctttgaaggggacactatttagagatatacctcctcccatttgctctactaatctcttagtaatcgtcagccccaatccgcttccctgataattggtatttctcgagtcctccaatgtgtacattcgttcaaagacacggtctttatgcatttcttttattccttttcctttatctgatatttctacaaaaacatcattatcagttattctgatctttaaacccaccatcttaccatcggaaccatattgaattgcattcgtaattaaattattcagaaccctctcaattgcatcttcatctccgctaacaaagacagaatcatcgggtatatcaatcactacttcaaattctttgctaattaaaatttcgtagtaatccaaaattatttttcggctgacttcacatatgtcaattcgtgaagaatttaattttttatctcctgactctaattttacaagttcaaaaaaacggtttattaacgctaatacctcgaccgtttttaaattaactgtttttagtaaactcataaccttttccgaagtcagacttttatcgttatttataatttcaatataacctagtataactgttaaaggcgtctttaaatcgtgtgaaatatttgataacatttttcgcatggacagttcaatactattgcagttccctttgatcttttgattatggtctaaaagacggtttatttgaattaacaaggattttatatatttatcttccgtgttaagcaataatctttcgcctgtctcttcattaacaacttttcgaagtttatttcttatatatttaatctcagtccttagatttaatcggcttcggaaaagaaatatatttactgctgcagagcatatgaataaaataaccaacatataaaacaatttaaaaatctcccaacttataaccgattccccacaaagtttttatgtacattggatgagatggatcgtcctcaattttctctctaagccgtctaatatgaacattaattacattctcatctccatgatactcatcttcccatacggatttataaagttgagacttagtatatacttgtgaaggattagaaataaagagttttaaaatattaaattcttttgccgtgagattaatcttttcattgaattttttaacagaaaagccatgcaggtcaacacttaaatcacctattttaatgattttttcttcctttgaagacagggagctcttatagtgtctttctcttctaatggttgctttaattctggctattacctccagcatagaaaaaggtttagaaatataatcatcagccccgaggccgagaccaagtgccttatctacatcttcatcttttgcagacatgataagaacgggaaccatacttttggaacgaatcattcttaaacattccatcccatctatcttcggaagcattaaatccaacaatataacctcaaacttttgggtgttcaatatgtctaaagcttcttcaccattaaaagctgctgttacttcaaacccttctttcgttaagctttcgcttaccatatcgcttatgaattggtcgtcttctacaattaatattttgtaacccaagctttccgctccttaaatataaaactgatattcttaattcactgtttatttcaatcattatacagataattaatctcattataattattttttatacaaaaggagataaatattccaaaacattttaaatacaaacaaataagacaaccattcttcaatagggggaattgttgtcttgtgtttttctctttttatctcacctttatcgaaccatcttcactagatagacttactttattacttcccgcgccaatttcaccttttttcagttttacgccatcatggctcttattaagcccatctagatcaaacgttacatcagaattactctgagcaaaaacagcaagtgaagttggcgcttttttataagatacacctatatctcctgatttcgtatttactgataaagattttccctctgttatgtccttgattgaaaccgtcccatctttagaggtaatctttacattggaactatctatttccttcatctcggtatcgccgcttgctgatgttatatttaattcctcaaaagaactattttccatacttaacgatccatccctggatgcaaattttccattatcagccgaaacattattgattttttcctcaccggaatgattttcaacgacaatattttcagctgaaatttcacttaaatgtatagtcccatctttattggttatttcaatattgttcatacctgactcgggaacattaatatagattgtgccgccctgcttcccaaaagtaaatccatccaaaaagccgccattcttttgttctttttgagtaacgaccaaacccctcccattttcttgaaatgtaactggagccttatctttcttcttcccctcagcagatattgttgccttatttgaattactctttttaaacttcacatcccatgagtcaatatatacttttaaagtatcaattttttcaacattgtaggacacgttctttttaaagttttttgtatctgtcttataaaggcttaaaacaattccgccgattacgattaacactgcacaagatgctataattttcttcattgtagaatttctccttttatctacaataaatctttctgatccaccttacggtaagaaagataacccactaaaaaaccaaataaacaaagtataattggaatgataataaattggcttaaactgactgtttctcctccgtcggaaactgttgcattgataaggaccccgattatgacagcccaagtgattgtagcagaagttgatttttttctcatgccgaaaaataaaggaatcagactcactcctcccatcataaaagcggtgagaagagtcgatggcatagcggaaataacttcactcatttcaacaggcttctcgaataaatataagtgcggactcacgaagagaattaacaagttaataacaaacgtagcaataacaatacttacaaagcagaataggaagacaatagatagtttagcttgcattaatttttttctttgtaaaggataagtaaacagcaattgtattgttttatttttatattcatcaataactaaacgggataaaatcacagcagaaaaactaataaacacaattctaattaaaatattagttagagatataaaatctgcataatcacgaaacataagttcattttcatttttagattcccatcccataaaagccgctaaggcaaagatgatgaatatccaaagtgccacccatttaaaatactgtgataagtgatgttttttgtactctaatttcataagttttaacatgctaatagcctccagcagaagaatttaagacaatgcaaataggtgcataacacagacgggcaatctatctaatgtgtattccctccccattcatagaatttaagaagtattcttctaaagaactgtgttttttatttatactttctataccaatgtcattcagaataagtgctttagagatttcttgttgtgtaactgctgtttcatagatacgaattaattgttgatcaatcattttaaaatttcttatccccagattttgctctaaaatatataacgctttttttatattttggacttttacctctatatactctgtttgttttccgtttatactcttcatagaaacttcttttattaacttgccattctgtatgataccaacagtatctgacatttgttccatttcggctaaaatgtgactggagactaataatgtaattccatattctctgcaaagtaatttaaagagatccctcaactcttttatacctattggatccaggccattaatcggctcgtctaaaatgagaagttctggtcttgtagaaatagctctggctattcctaacctttgtttcattcctaaagaaaactctttcacttttttattatcaatattatgtaactttacaagctcgatggcgtggtcaatggattttttatcgtaatagcccatatattcacaatggaaatctaaattttctttagcagtgaggttgtcatagaaaatgggatattcaataatggtgcccattctttttaaaacttcaaatgacgtatctgttaatttctcaccgaaaatttctatttccccacttgttggcttgattaaatttgtaatcattttcataatggttgttttacctgcaccattgggacccaagaatccataaatctccccttttttcacgtgcatattaaccccggaaacaacttcttttcctttaaatgtttttgtaagctgactcgtttttaagatgtatgtcattcgctttcccctttccatatatactcctactatataaaggaaagttctcttttctcttaagcaaatattacttttttcttaagatttttctaattaaatcctatccccattctataaatcattttttatttttttaggatgcatgatgtccgtaggagaagaaagggaggatctcttaaatttcaggtccctaactgaccgccatcttccaagacatttttgatgaaattgctcttcaggccagcaatcatgatatagtgggcggtcgtatcttattcactggctccactcatatcaaagtcaataaaaacacaaaaacgaagacatccgctgtcttcgtcttgtgcgctatcggtgagccgtctgccagtcaaatccgatggtgtcatcattccacgggattcttttttcgtcaggctgatccggattgtaggacattgtcgtgaaataaataatggtcagcggggtttcgcccagcactctgtacccgtgtgcgacgcctttgggaatgagaaggagcatcggattgtcttctcccatgtagtagacatccgtttctcccttggttgccgactcttcgcgaaggtcatgcagcacgacctgggcgtggcccgtcggaaaaaaccataggtcatcctgtttctcatgatagtgaaacgctttaatgacgccgggatagcttttggaccaggaagcctgcccgaaacgctctaagagatgttcatcgtcacggacgagttctgagaaaaaaccccggtcatcgctgtgtttgatcagctttttgatttttacgccttcgatcacttgcactgtccctccctttgtaaataatcatgcagcgcttcccgccaatgcctcatcccgagcccctgccgttcaatcgactcaagactcaacaccgagtaagcggggcgcggcgtctcatttccgtattcctccgtcgtgacgggcagcacggcggcggttctgccgctttcttcaaaaatagccttggcaaattcataccagctgcacactccgctgtttgcggcatggtataagcccggcggcctgtcaaacagaccgatcaccgtttcggctaaatcttttgtatacgtcggcgctccgacttgatcgttaacgacacgcacctgatcatgtgtatccgcaagcttcagcatcgtattgacaaagttgtgcccgccgctgccgtacacccacgatgttctgataatggtgtggttttttcccgtcaaccggatcagttcttcgccgagttttttgctttttccataaatcgtgcccggatctgcgggatcatcggtctggtatggccgtgttcctttgccgctgaagacgtaatcggtgctgatgtgaatgaatttcgcgccggtgttttcagcctcaagcgcggcataataagcgccgattccgtttattaaatacgctttgtcgagctccgtttcacatttgtcaacggaggtgtatgccgccgtattgacgacgatatccggcttgtaatggctgaacgagtgccgcaccgaacgctggtcggatatgttcatcatcgcttttgtcaaggcgatcacttcatacccttcccgcttcagctggcggcataactcccgccccagctggccggccgctccggttactaataccttcgtcaatcggatccccttctttccgattagtcttggctgtctgtataccagcgaatggttcttctcattccttcttcaaatgtgacgtcctgccgccatcccagctcatttttcagctttgaagcattgatggcgtaacggcggtcatgcccttttctgtcttcgacatgagcaaaccgttcctcgacaccgagctccttcatgataaatgacgcaagctctttattcgtccgttcatttcctccgccgatattgtaaatgtcaccgagtgttcctttttccagcacgagcttaatggcgcggcaatgatcttcggcaaacagccagtctctgatctgcatcccgtcgccgtacagcggaaccggcgtgccgtttacggcatgcctgataatggtcggaatcattttctcgtgatgctggtacggcccgtaattgttgctgcaccttgtaatgatggcaggaagcttatgggttctcacataagacatgacgagcaggtctgagcttgccttgctggccgaatacggattgttcggagaaagcggcgtcgtctctgtaaaagcgggatcatccggcgccaaatctccgtacacctcatctgtggaaatgtgaatcagcctgccggcttttccctgtaacaccgcgtccgccagtcggtatgtgcccattacatttgttgtgatgaacggctctgcctgatttatgcttctgtccacatgggattcagccgcaaaatgaatgacagcgtcatacatttgggaaaaaactttgtcaatgtcctctttttccgaaatgtcacctttgataaaacgaaaacggccgttcttttttaaggcttctatttcaagcggcctgcttgcatacgtgagattatccaggacggtaatctgcgcatctgtttctttcagcatcatctttgtaaaggtaaggccgataaatccggcgccccctgtaattaaatatgattttggcatgattaatgctcctgtcctttctgtaatgcctgatgcgccaggcttccggcgaggtagagcgattcatgcgtgcccgcatccacccaccagcccgttaacacatcatacgtcagctcactgtgttcaatgtataaattattgacatccgtaatttccagttcgccgcgttttgaaggggaaatttgttcaatataagaaaacacttctgcgtcgtacatgtagatccctgtgacgcatagtctggtcggcggctgctccggcttttcaatgatcgacttgatccgtttgtttttctcatcaatctcggcgatgccgaagcgctccggatcgtccacttctttcagcagcactttcgctccttttccctgctttgcgaaacgctccgtataaggttttaatgaatcttcaaaaatattatctcccaaaagcagaacgaacggatcgcgcccggtaaaccgctttgcgtatgataaaccgtcggatatgccggatgcggcgggctgaacctgatatgtgattgagacgccgagctcttctccggtttcgagaagtttatgaaattgcggaatgtattctttttgcgtaatcagcaagatatccgtaatccccgcttcttccagcttcatgaccgaccagtaaatcatcggatatggaccgacagggagtaaatgcttattgaccgcttttgtcagcggcataaggcgtgagccggtgcctccggctaagataacacctttcacatgaacacttccttacgtgtggttttatcacaaatcataaagaatcgccgcagcccgtttgatgcccctgccgtcaaccagcggctttccgttttgatgaagcccggtccgcagcggataatcagcggccatgtcagacatatgccgtgcgagaacgtccggtgatatgcattcaccaaggccgagatgaacggcggccccccgtgcggcgaatttttccgccgtctcagtttgatgctccacttgagaaagtacgatgcagggcacacctgtacaaatggtttcatataaagtgatcccgccggacacgacggccatatcagccctcgaaagaagcgcggccatgtcatttgtctgccttaccatctcggcataaggcatttgtgtaagatgcgcgcgcacgtcatcagcatgagccgtggcgccgcccatgacgatgatcactcgttttcgatgaatgtcggggatgcggcggcatgcttccatcactttaaagacaagcttcttcgggtcgcttcctcctaacgagaccaatatggtccggcattcttttctcagctgataaagctgtttggctttttcaaaacccggatgaagaatcatatattccgggccttcatataccgcggcgctgcccatttgaaccgtccggcttttcagccctccgtaaatgccgtttataacggcatcgcataaatgaatgacatgttcccgtttttcttcaaataagacgatgcgtgccgatgaatgctttttgacttcctctaaccagtcacacggcatatcgagcagatcgaatatgagaaggtcaggagcctgcctgtttatttcccggacaataaattccttctgttccttgtcaggcttgatgatcacttcccattgatcagaagacagataagaagaagcctctttatttgtgtagaacgttattgagcaattgttcttaatggcaccggcaagcagcttcatccggaccgcgtgccccatgccgatgtcacggcctccgtccgcgaaaatcaaaacccgcatgctaatcagcctctttttgccggatcatttgattaatggccctgagctccggatcacgattcagcagatggatcaattcttttgccggaatatcaggacgcgagcccgcttttacgtacagctcgcgggccagcctgtagtcctcttctgtatcgacggtcatccgcaagtgaggagcccggagttcctgcggaggctcaggaaagagaagcaggtacttctcaggagattctcttattaaaagcgtgacatgctcctggtatttgtccgccagcgttttgtcggcattgatctccgttaaaagtcgcgcgtttaccgcctcgccgccgatgccgagcggtgtaccgcaaatatacgtgtagtctgcgtgctgatctaaatgcgattgaatcagaaaatcaagcagcgaagggtcgacaaacgggttatcccccgtcagtctgactgtgatgtccggtttaacttgttcgatgacttgtgcaaaccggtcaagcacgcgctgctcgctgccgcggtgcacacggtagttcttgctgatgcagtgcgcagacagaatgtcgtcggtcttgctgtcagacgaggcgacgatcagattatcccgcgattgatcataatacgcgctttgccgaacccttttgacaatcatatcgaggatcgtatacccgccgatcggtttcagcactttgccgggaagacgcccgcttcccatccgcgcctgaatgataaacaaaatgtcagtcatcatatgggctgcctttcgtcaaaaggtcatcccaagtgatgcccgtgtcggcggggatatccctgaccgcacgcgcgccgtcagttaaaagctcaaaatatctcgggtgaagcccctgcggtttttggccgggacgaaggacggcaaggttttccgccgtaaaacattcgcctttttgaatcggcgccgttgaaaaaatgcctctgtaagcgaaccttctgatatccccttcaatcggtgtcgtggttttatgggagcttcccgacagcacttccggcaccggagcgtgatgcccccgccgcagttccgcttcaactgagcggatcgccgcaaccatttcttttaattcatccggattgagggcgaaggagtgatcagcaccgggcaggtttttatcgatcgtaaaatgcttttcaatcagtttcgctccgagcctgacagccgcgcacggcacatcatacggatgggcgctgtgatcggagaaaccgatcactgcatccgggaatgcggcggcaagcatgggaatgacgctcagattgctgtattcaggcggcgcgggatatttcgctacacaatgcatgatcgcaatttctgtgttcccctcgccggtaatggtttgataagcctcctgaatatctgaaatatcagcacccgcggtggaaaagataatcggtgtcttcagtcccgcaacatatttcaataacggcagatgattcagctcgtaggaggcgattttaaaggctgaaggggaagtcgcatacagtaagtcggcagagccttcgtcacagaccgtgcttaaaaacagcacgccttttttcttacaatattcaagcagcggttcgatccattcggcgggcatttccattgattgcaccaaagaaaaaatagagacgttttttcccgcagcggttttgtacaagccggggtctttctgatacattttgtcagcctgaaacatttggaacttgaccgcgtccgcgccggcctcactggccgcacctatcaattcaaacgcctggctcagttttccgtcatgattaattccggcttcggcgatgatgaatacgggcgaaccttcgccgattgacttcgttccgatttggcatgatgccatcagtccgcctccttcccgggccacacatgatagtagtaataggacgcatccgctttaaatcccattctttcatacaggcggatggctcttacattgtggagctgcgttcccgctgatacagtcttatgctgaaagcgcaatgattgttcaatcacgtgcgccgctaaatggaatcccgctccctttccttcaaatcccggctttaccgccatcagatcaaggacgaattcatcgcctttagacagcccctgaacaaagcccacagtctctcccttatatgtggcggcgaattgtaacgaagctctgccttccgcattattccgcgcccactcttcaaacaggcggtttgcactttcatagctgagatgggggtcttggtaatacctgctttttgtaaaggcgtcgcgggccagccggctgatcgcttccgtgtcgccgggtccggcttctgtaatctcaaatggcggcgtgctgttatatacacgcaccggactgacgagcttgagaagactccctacaaaataagcgttcggaagctgctgaacgacctgcatcgcgccgatatcttcagccggtattttaataaatataaaatcagtgcctgccgcccgccttgccgcgtaaaattcctgaaacagccttttgagctgtccggcgctgtttgcggctgcaagcttcacattgatgatattttttcggaacaattgactttcccacgaagagttttcatataaaatcacgccttgaaggctgttttcttccaataaacagagcgacgattcataggcttccggctggatgcccttctgatgcaggaaggtatgaatcatgtcctgcgcaagattttccctcagtctgtacacctaatcagcccctttgacgatatccgtaacggctgcaatgacgtattcaacgtcgtcatctgtcattgacggataaagagggagtgacacggtgcggtgataatacgcggccgcggccggaaagtcagtttccttatacccgtacgttttttgataatacggatggaacggaaccggaataaaatgaacacttgtgccgatattatattggtcttttaaagcggaaatcagatcgttccggctgaccccggcctcctgctcctctatttgaagaacatacagatgccatgcatgccgcccgtcatcactgacatgcgggatggtcagccctttcatgtgtctgaaggcgtcctggtagcggctcgcaatgtcggctcttctttgctgcatgctgtcaatccgtttcagctgatgaagcccaagcgctgcctgaagatcaaacatattcattttatagccgggcgtttcgacctcgtagtaccagcttccgtttgaagaatagcggttccacgcgcctttgctcatgccgtgaaggctgagcaccctgatctgatcggcaagcccgtcatcgtccgtcgtcagcatgccgccttcaccggttgccaggttttttgtcgcgtagaagctgaatgccgtcgcatcaccgattgatccgatcattttctgtttgtaagtggtatacacggcatgtgcggcatcctctaagacaaataactgatgcttttcggcaatggccagaatctgatccatatcacacgactggccggcgaaatgaacgggtacaatcgcctttgtccgcggggtgacggccgcctcaattttttcagggtctgcattcagcgtaagcggatcgatgtcaacaaacaccggaacggcgcctgtgtgcacgattgtattggctgttgaactgaacgtcacggcagacgtgatgacctcgtcgccgggaccgatccctttcgccttcagggccaaaaacaaagcggcggtacatgagttcagcgcgatcgcgtgctttgcccccgtccaggcggcaaaggctttttcaaacgcctctactttcggtccctttgaaagccagcccgattcaagcgtatcaataacctcctgaatttcgtccttcccgatcatgggcaatgaatagggaagaaaagctgatcttttttgcaccattttctttgcgctcctatcttttttatgaagggtcaacccgtctgaagctgactccggttttttcctgaagcacttggcataaagcggcaagcgaatcctgaaccgggtagttcgcggcgacaaaagcacggcgcgcctgttccgctttttgatattctgcggggctttcgcatatccggattaattcctgagcgagtgcctgcgggtcctcaaagacaaattctccaagtgagtgataataagggtatctgcgggttcccgctgattttccgatcagcacgggcttttgaaacagcatcgcttcaagaccgaccgttgatgtctgtgtcaccgcagcgtcaacatacgggagaatatcatacagctccatctcttttttgatgattttgcctgctttatatttccgcagcacctgattgtaagcatccagcttgtttttgccgatttcccacggatgcggtttaataatgagctgcatgttcttttggccggcaagctcttcaagcactcccgtataaaattcatcagaaaacggctgcgtggcgatcagcaccgtccgctgtgacgggagaaaagaaagtttgcggtaaaacgtgtcctgatctatcggctctcttgagaaaatctcgtcgaaacggggatgccccgtgatgatgatttgttcatccctgcagccttttgctttataccactccgcttcataagccccgaatacggcctgatagtccgtaaacacgggcagaaacgcttcatctcccatgagcgctccgtgctgaagacagatgctgacggcgttttttttcgcggacatcagcgccagcacacggctgtaaatatcctccgtcgtgccgactacaacagcggaaatcttttcggccgtaaacaaaatatcaatagcgtcaatcgcttcaataaataatggaatgtctttatacaaacgttcctgaaattctctgtttccgaaagcgggatggctgtgaagctctttcagaatggaatgggctttttcaatataagggacggggttcccttttttccccattcccgtcagctccaatttgcagataacgggcagcccgtaatggtcaggcagactccatctggccagtaccgctgtttttgccggatcaaactgccggtagtttccctcggtgaaccgaagatgatcgaaatgcagaatgacttttccgtttaccggtttctcatctgttttcttaatgttttgccttttttgatcataatatggctgtataccggcttcaggaatatgctgatcagccggaccgaaaagctctgggttctgctccatgctctcccgaagcgccggactgatatattgataaaaattactgatcaatgcgagcgggatgtctttgtagcgaagtgactgaaaaaggtcaatatactgccggtacagcacccaatagttcgctaagtatgccgacaagccctcacccctttccaagcttttttaatgattccctcagctcccggcacgtggtctgctgcggaaggctgttcacaaactcgtttttctccgccgcgaaaagctgataatggatggattgatcggtaatataattgatatcaagctcctcagaaatcgggtaaaacggataaaaatgatttactctccagaagaaacgggcgtcaccgatccggtaaaacgcggggctttcatcccaataggaaccgaatgccgatttgacctgttccagcacggaaaaccggtgcatgaccgaacaatggtcaatggcgcacggcgcgttccacacgatccgttcggcgggcctggccgtctccttcaccgtctctttccgctgattcagatgataggttttggaacttgaatacacgacggctttttccgggtcttcatcaagctctttcaccattttctcaagccgttccggcacatacgtgttgtcgtcggtcgcatacgtcacgtactcgccctccgccatttctattgcctgattaatcaaggcggcgtagcgtgttttttccgttctttctttgacgcccgatacatcgctttgataaaaccggatgcggtcatccgtgagaaaaggacgtatttccgccaatgtcgcttcatttgagttgtcatccataatgaacagctcaaagtccgtaaacgtctgagacagaatacttttaatagagcgggccacatagtcacttttgttatagctcgtcatgatcactgacactttaggcaactcgtcacccccttttcgcacctgaaactaccgctatcatatgttccttatgcggaagatgcgctaggaatacagactattatgtgaaaagtcagcattgcgatcacaaaaaaagccggctctgatgcccggactcattggagcgtattttcttttttcgcataaatctttctttgggctcatatggtggaatagataaaaacagcagccgctctgtcggctgtctgatacttgtcaggaggtttcagcatcaagaggttttcatcaaaggaggaacaatatgaaaccgaaaaagaatcaatatcagcaaatgcaggggatgggaatgggaatggatatgcaaggataccagccgcagctcgggcctaatccttatccgcagcctcagggccaaggatcacaaatgatgccgatgcagcagcaaatgacaatgccgatgcagcaaggccagcagagcttcggcggggggttccccggccagccgcagcagcagggcggcggcagctttcagatcccgtcaggtccatcatcgtcacaaaacgttcccggcatgctgccgattgaagagtcatacattgaaaatattctgcggttgaaccggggcaaaacggcgacgatttatatgacatttgaaaacagcaaagaatggaattcaaagattttccgcggtgtgattcaggcggcgggacgtgaccatatcatcatcagcgatccgaaaacgggcacccgctatctgcttctgaccatttaccttgattacatcacgtttgatgaggaaatcgcttatacttatccgtactccatgtcttcttattccccgagataaatcaaaaagccaatcgctcacttgacagaggattggctttttttctttataaatatttgacggcctcgacgataatcataatccaagagatgataaacgccacgccgccgagcggtgtaatcgcgccgagaacggaaatctgcgtcacgctcaatacgtacaggcttcccgaaaacagaacgatgcccgcaaacatcagccagcccgcaacagaaacactgcctgcgccagaaagcttttcggccaaaaacgcgacagccagaagaccgagcgcgtgatacatatgatattgcacgcctgtgtgccacacctgcaaatatttatcggggattttcccttcaagcccatgcgcgccgaaagcgcccagcgccacggccaataaagcgttaatcgcaccaagaataataaacactttcatctatttttctcccgccttttcgttaaagtttccaattcaatcataacccaacatcggcaaaattcaacgtccgccgtccgatgacacgagattgtcggattttttctttttgataagttggattcggtcaatcgctatcgccagcagcgtcccgagcacaagaccgttgcttaagagcgaaatcaggatcggatgcatccccgataacgcgctctccggcacaaacattacgccgacccccgtcaggagcgccagaccgataatggagcggattcgtttttgctccgctttctcataagagtcaaactccgtaaaggcgagaccggccatcgtggagaaaacgacgaagtttaccgcaaagccgaccggtgagggcagactcgcaaacgcattcataaatagcgggatcatactgatgatcacgacaaatacacttcccaaaagaaacggctttttcgaaggaagcttcgtcgtctcaataaaaccggccgcccctgaaatcggcacaggcgcaatgccccctgacagtccgctcaaaaggtggctgatcgaagccgcaaacccagccggacgctcacgccgcttcccgacggtgccgccgaattttttcaccgccgcttctacaacccggatgctcgcgagcatgttgacaatcaaaagcacggtaatgaagagtgatgtaataatcaggccgctgtcaaacacgggttttccaaacggaaaaagagccggcagctgaatcacgcggtccggtatttgaatcggtttggcagcgccgaagacgacgaataagatccatccgccggcaagcgaaaggagaatcgcatactgtcttaagaacgtaacattcgatcgggacatgatgaacatcgccgccgtcacaaccatggcgagcccgaatacaaggccgtcgacgctgttttttaaatagccaatgcccaaaaggcctttcacaatcggctgactcagctgcatgaccaacagcagcagatacacaccggtcacaaccggcgtaaacagcacggccagccgttcaatcactttaaaaaggctgaacaaaaagaaaaagacagcgcttaataacagcgccccctgcagcgcccgcagcgtctcgccgaatgtcgcgaacaccgtgccagtcagtccgccgtaaatcgtgtatacgccccaccataagcctgccgggctttcattaatcggcagacgatgtccctggagacattggatgaccgcggcgacgccaagcacaaaaaatgtgctctgaatcaatgcggcagaatcggcatggttcaagtgaaatgattgtgcgatggcgacaggaactacaatcgcagctgcaatcataaatgccgtccattgcaaacccccgagtatcagtttcaagtcaatcaacctctcctgttaaaaatcgaaaatggaatccccgtttccgtcttcctcacgttcgtctttcgcttttttctgatattggttcagcccggcgctgcccatcattttttcaagcagcagcgggtctgtcgaaggagacgcggaaggtttcggcgccgctttcggaatcggattctgcacaggcgccggagcggtgtgcgtctgagtgccgagcacgacatcacacagagagcggatggcggccgcgtgcattttgacctcctcggtgcgggtcgccgttttcgcctgcctcagttcttcttccatcttctgaatcaaagcagagatatgtatgttcatgagtaaatcctccagcggtaatttgtcttcttcctgcattttatcaaatttctgagcgaatcgcagaattgagtttgttattttttctgacggcataccgcccggaacgccaaaaaaggcgctttccgccgggcggaagcgcctcaaaaaaaccgtttattgcggcaggtcggggatgcaccaatcgatcggctgctcccccattttttcaagggcggcgtttgtacgggaaaacggtctgctcccgaaaaaaccgttccttgccgaaaacgggctcggatgagtcgattcaataataatgtgtttcgatgtgtcaatgcgctcttttttcatctgcgcgtgacgcccccataggataaagacaatcggcttctctctttcattcaccacatcaatgatgcggtcagtgagccgctcccatcccttgcctttgtgggaattggcctgaccgcggcgaaccgtaagcactgtgtttaacaaaagcactccctgcttcgcccagctgacgagcgatccgtggttcggtacggagcagccgatatcgtcctgaagctctatgaaaatatttttcaaagacggcggctgcctgaccccgggctgaacggaaaaactaagcccgtgcgcctgtcctggcccgtgatacgggtcctgtccgagaatgaccgcttttacatcctcatagggcgtataatgcaaggcgttaaaaatatcatggctgtcaggataaatcgtttggctgctgtattcttgtttcagcatttctctcagctcttgataatacggtttgtcaaattcatctttcagctgattccaccagctgtcttttaaaagctgcttcaaactgtccgtcccccttatgaactgtgcagtcttgaatggacgggctttccgtcccacacaatgtcagtcggcgcctcccgcctcttcatgtccggctcttcaagaagaaccgcgaagtttttcgtcgggagctccccaagcccgtgcttttcgcttaaccggtctaagtacctcttccgtttgccgccgagatccgcggactgattgccgcctccctcaaaaaacgcatatatgacgctcgcgcaaggaacacgcttcacacggtgctgttttgcggcgcgcaaataaaagtcccagtcccaataattatggacatccggatcaaaataccctaacgtgtcatgcagagaacgcctgtacatgctgcctgacggaacgtacgtggaaaatacccgcatatccgcataatccgccgtataggcgaaaggctttcgtgacaccgggtatctcgtgccgccccgttcttcaaatgacacaatttccgcgtcagaatggacaaaatccgcatcagcaagtgcagccgccattctttccaaatggcccggcgtaatgaaatcatcatcatcgcacagcatgatacaatcacccgacgcttttttcacacctgcgttccgagcttccacatgtccggcattctgttctaaatcaataatctgaatcggcagatcgctgtacagctgcttcgcttgttcgaccgattctccggcatcatttacaatgatcacttcataaggctttatggtctgcatggaaatcgactccagcagctcacacaaagccggaatccgattatacgtgactatgacaattgatatattcatgatccgctccttctgctttttctcatgttctattaaaacataaagcggcggagagatcaggggggatttttgatttcggcccattcagaaacaaatccaggtcatgcccgccagcaaaacgagaatgatcagaaggtctccccaaacagtgcagaccgccttggcattaagtctgcccgcctccatggcgttccaaagttttgattgataaacaggcaccaacaccatcgcatagcatgtgcacaagcagacaaaagccggcgggacaagcgcacatccatcctcattccaatcatgaataagttccggtatactcaccccgctgtcaatgtacaagtataatatacccgccagcggaatgagcgaactgatctgcagctcgaaaagttccaccttccactcacgcgcaaacgaaacggcccaaatccatcccagcgcataaaacaatagaagaagcaaaatactgaaaacaacaaaaatagcgtcttgcatcccattcagaaccataataaaaagacttacaacgggcaatgcaagaaccaagccgcagacggtaaatacggtaacggctatttgggcgcacgcgccgtacatccacgaacctaatctcattttaacacccctatatagattccctatgtacatagtgaaaaagatcaggcaagcctctgcctgcctgcgtaaaaacctattttgccgcaaaacggaaaacataccgtcacaacggcgcatactgccgcaaaactcggtgtgaccgccgaaggaaacagcccagccggaaccagattgaacaaaaagacaaacataaaacatagattcggcgccattgaagcccataccgtccgctcagcaagctttttgccgccagccccgaactctttgccagcttgatagccgatttggaaccaatacagcacataaccgatcataatcagccatactgacacggaaatccctttccacagcgcgtcaacagcgggatgaatcctccacgcgtgcatcatcgtaatcatcgcccccatcacaaaaagaccgcagttgcagaacagataaaagagcataaaagtccgcgcgggcaccgccgaagctttttgaaaagcagagataatctcagacggagtccccacttcccgcagaataagcgccatcgcttcgctttcggttttgcctttttccagatgatcacaaatggcatgatgaatatggctttcgatttcttttaataattcacggcttccggacttgccttccagcccttttctgatttcctgcacataaaggtctttatccattctgcccgccccgcttcagcatccggtccatcagagcagagaacagattccattccttcgtccgttcggctagaatgttttttccttcatcggtgatccggtaatattttcggtccggccctttggtctgcttttcccagtaagaagaaatatagctttggcgttcaagcttatgaagcgatgggtacagcgtgccttccttcatttgcagttcattcccgcttcttttctccatttctttcacaagttcatacccgtacatgggccgttcattcagcagcgtcagcaccagaatgaccgtgcttccctttacaagctccctgttgagcatttattttctcacccttacctagtaatcttatgtaggtattgtacgcacatcccccgcggctgtcaaatcattcctctaagccttccgtattgtgatcggaagaaaatctaactataatgagatataaaacactgatggaggccattgatatgtcaatgcacaaagcacttactattgccggttctgattccagcggcggcgcgggaattcaggccgatttaaaaacatttcaagaaaaaaacgtatacggaatgacggctttgaccgtgatcgtagcgatggacccggagaacagctgggatcatcaagtatttccgatcgatgccgatacgattcgcgcacagctggcgacgattgttgacggaatcggcgtagacgccatgaaaacgggaatgctccctaccgtggagatcatagagcttgcggcgaaaacgattaaagaaaaacagctgaagaatgtcgttatcgatcctgtcatggtctgcaaaggagcgaacgaagtgctgtatccggagcatgccgaagcgcttcgcacccaattggcgcctctggcaaccgtcatcacgccaaacctgtttgaagcaagccagctgagcggtatggatgaattaaaaacggtggaagacatgacagaagcggccaagaaaattcacgaactcggcgcgaaatatgtattgattacaggcggaggcaaattgaaacatgaaaaagcgatcgacgtgctgtatgacggagaaaccacggaagtattagaaagcgaaatgattgatacaccttacacgcacggagccggatgcacattctccgccgccgtgacggcagaactggccaaaggcgctgaagtgaaggaagccatctatgcggcaaaagaatttatcaccgcggcaatcaaagaatccttcccgctgaaccaatacatcggaccgactaaacattcggcgatgcgtcttagcggaaaataaaataaatatccccctcattacccgagggggattatttcatttttttcgcggatgaccgcaaaaacatctcaatagactgcacaaacagcgcatattccttcatctgttcatatgtatgcatcagccgatcactccattcattgtgcggctcagctctcttgagcatgcgattcagctgaagcaatacttctttatattcttcccgcttatcttccacttgctctgcggctttgacaagtaaacatttcggcgtcatcttctgatttttcaaaactgagaaaacaactccttttattcctggaatcataggctttcgtttgaagaatagcacagatggcataggtttcacataagaaaaaagaacgattttctacaaaagtgtccaaattgagccatttatttccgtttttcctgccgaagtgacggttacgtcatcatttcccgggaaaggaaaatatctggcgctgaatacctcttctccatcattcaaaaacaattcaatcgaggatgcatccagaaagagctgcacggaatgcacctcgctgatggcgcagcttctcttttctttttcttctccgctgaaagcggtgcgctccagcacagccagcccctcttcctgatgaaatataaaccgggccgccccccgaattgagatttcaaaaccggattcgcaagtgatgtcctccagcagcacttcagcccgggacgcatctttcaccggcaggcttacagacgagcaattcaattgaagacggtgcttttgttcatccgtgcggcgtgatttcatttccgaaagcgggcgctgtatgattctgccgttggacagtgacagctgtctcggcatcgttaagcagtgaatccagtgatacgcatgggtcggatgtttgtcctcatgctgatccggaacgcccatccacgcgaacagaattctccgtcccttatcatcttccagcgtctgcgccgcgtaaaaatcaaatcctctgtcaagctccgtaaattcaccgtgcttaaattctggcggctctgtatgcagcctgccgaggaaatagcccgcctggtggctgttatgatattctatcccgtcggcttcaagcccctgcggacatacgagcagcacgtcggttccgtcaagggaaaacaggtcgggacattcccacatatagccgaatgacccgagaccgccggagtccgcccccgcaatcgcaccgagaaacgtccaatccgtcaagttctctgatgtgaacaacacaacgcttccggtgagcttttctgtctgcgcgccaagcaccatgtaatacgctccgtctttcttccaaaccttcggatcacggaaatgagcggtatagcctgccgggagacgcgcgacaactccttttttttcaaatacgatcccgtcttcggatacggcgaggcattgatacgtttcccgattgccttctccgtcacggacattgcctgtgtacatcaggcagagccgcccgtctttttcgatggcgcttccggaataacagccgtttttgtcataccactcacccggcgcaagcgcgatttcttcctctttccactcaacgaaatccttcgtcgtcacatgcgcccaaaatttcgcgccatgccccgtatgaaatggctgccattgaaaaaacaagtgatatacgccgttccattggatcacgccgttcggatcatttaaaagcccgaccggcgccataatatgatagttctggcggtatggatctgacgcggctgtttctccccgcttctttttcgcttcctcagcctgcaggcgcagctcttgatccggtgtcctcatttgacggcctccttttctttagctcccataatgtaagcggcaataaacgccgagacagaggcgatgcccattccgatcagatagtttataagatttcctaaaccgagcggagccgtgatggcaatcatcggaattccggtcagaccgtaggcattggcggcgacgccggtcaccacgacataggctcctcccagcgctccgccaatcattcccgcgataaacggcttacggtaccttaggttcacaccgaaaatgactggttcggttacaccgagaaaagcggaaaatgcggccggcagagcgatttctttcattttcgcttttttcgtcaggaaaaatacagccagtcccgccgcaccctgagcgacattcgccatcgaccagataggaaggatatagtttctgcccaaatcagcgatgaggccggcctcaatcgcatgaaagctgtgatgcacaccggtaagcacaataagcggataaagaccgccgaaaagcagtccggcaacaattcccgcatgatcatacacatatgtcagcgagacggtaatgcctgatccgatcgccctgccaagcggaccgattgcgataaaggtaataaatcctgtgacaatcaccgtgacaaacggcgtgaccaataaatcgaatgcgtgaggcacaatttttctcgtgcccttttccactttgctcataatgtaaacggctaacagtacggggatgaccgtcccttgatagccgagcagcgcaatgtcgaagccgaagagctgcataaaatcaggcgatgcatccgcaagcccccacggattcaaaagcgccggatggatcataattccccccagcacggcaccgagataggcattaccgccaaattccttcgccgcgctgaacccgatgaatacgggcaggaagataaacgccgcgcttgaaaacatgtctaaaagcttaaacagcgatgattgttcagacacccagtgaaaagccttcatcatgccgagcagccccattaaaagtccgcttgccacgatagccggaatgatgggaacgaatatgttagacagtgtcttcgcaaatcttgcggccggattcagcttttttttcgctgcgtcctgatgtgtctcacgatcttcccgccccaaatcggcttcttttgaaaaagcgtcatacactttattcacgaggccggtgccgaatataatctgatattgccccgagctgctgaaagccccttttacgccttctatttcttcaatgccggcctggctgatcttctgttcatcttgaatgacgagcctgagccgcgtcgcgcaatgtgtcgcgctgatgacatttgattcccctccgatatgcttgataagctgttttgccgtttcttgataattcatgatgtatccccctttctaaaatcaaaaaagacctaaaattcgccaacgaaaaaggtcagcatgatccctttttcatgtacgcaaattttaggtcttgcctgcattaccagtcacaatcccgccggattcagtttttttaatgcgctttcattctatttcatgatagcgctttcgtcaatatgttttcaaaaaaaaagtctgtttctcgaaacagacgcgttattccgggtttttttgcagacgctggacatgcagcgtaatatagccggcctcggattccggcagttccaaatcatattcattttttaaaaacgccgccagttcaagcgcacaccgataagcaaacggatactttttttggatgaaataaagcatctcctcgtccatggaatggagtgcttcatttgagtccaaccggctgaccgcataccgtaagtgcgtgacgaggcgctgataggaaatactgtcttcatccaccttctgttcgaaaaaggattcgatcttttcgatcatttctttgatcatggttgtatgcttcatcgccgaatacatgcttttggcatccgccttggcagtgtggatatgaagcgcgatataccccgcctcatcatcaggcaatgatataccgagggtttgtttcacgtgttcaaccgcccagcggccgatctcatattcttttttataaagcgccttaatttcatgaagcaatcggttatgcacctgaaggccgttttgaatcctttcgatcgcaaaggataaatggtccgccagcgcaatgtggatgtgatcgctcaaaggtgccgcaagctctccctccgcatggctgatgatatcttcagccgcctctatatgctcttcgggaagcgtttctaacacttgtttgaacttttcattttcgtcgtgcacgacaaatattttttcaattttatgtttttgaatcacatcattttttctcttttgaaaagcgattccgggacccattacgatcttttcccgtccgtcttcttttattaacgccgcattgttatttaatactttgtctattctcaagaggttcgctcccgttcatatgtttagtgggattgtaccctctttttcatatgatgtaaaggtgccggacccgcgcgctcccgtttcggcaattctttgcggacaggcatccatcggtttttatccagcctgccgcgggccgatttcgtttcatcggtcaaatccgccgatcggacacggctcacaaacgaaaaagccccagccgtccgcttcgctttcttataataagccgcttggtttccgtacacggcagctaatggatatcttccgttacccggcgccatccagttcatcagaaagaccatccacacccgtaaagatactagcaaacgtttcattgcaaatcatccctccgcttctttttgacagacagcttgttcgcaggcctgtttttctctccgctttaacggaaaaggcggccgatccttctccgctaaaaactagcgggtctagcaaccctatgactctatgatagacgcggccgggcgaattgtttgtcacaatatgagtgaaaaaacaaactagttttcagaagttttgttgaaagctgatggaaatgacctgaaaaatggaaaagccgataaaaaaagttatacacaccttatcccttggttaagcacagcttaaacacagggtatatccacatatccacaaactcgatctatattttgtataagaacactcgttcccaacaatatatatacacaaatttattcagttatacacaggattctgtgtataactccctccttattcacagaccaatttccataaatgagtcatatgtcacaaggattattttgaattttcaagaaatatatactagatttctaatttagataaagaaaaagggggaaacacgattgaaaaaaggaatcatccgttatctgcttccggcttttgtcttatcctttaccttatccacaagttcacaggctgcgccggcttcaaaaccgcaaactcctgatcttgagaaggctgaggtgttcggtgacattgatatgaccaccggcaaacaaacgacagtcatcgtggagctcaaggaaaagtcactggcggaagcaaaggaactcggcaaagcacagacaaaaagcaagctgaaaagcgaacgcgcaaaagtgaaaaagaaagcgctcaaaaccattaaacacggaaaaatcaacagggaatatgagcaagtgttttccggcttctccatgaaactcccggcaaatgaaatccccaaactgctgagtgatcaggatgtcaaagcggtttatccgaatgtcacctatcataccgatcagctcaaagataaagacatcaccctatctaaggatgccgtgtctccgcagatggatgacagcgcgccttatataggggcaaatgacgcgtggaagcttggctatacgggtaaaggcgtcaaggttgccattattgacaccggtgtcgaatataaacaccctgacttaaagaaaaatttcggacaatataaaggatacgattttgtggataacgactacgatcctgaagaaacgccgtccggtgatccgagaggcgcgtcgactgaccacggaacccatgtcgcgggcacggtagcggcaaacggaacgattaaaggcgtcgcgccggatgctacactccttgcctaccgtgtgctcggtccgggcggaagcggaacaacggagaacgtcatcgccggcatcgaacgcgccgtacaggacggagcggatgtcatgaacctttctctcggcaattctgtgaataacccagactgggcgacaagcacggcgcttgactgggcgatgtcagaaggcgtcacggccgttacatcaaacggaaacagcgggccgaacaattggaccgtcggctctccgggaacgtccagagaagccatctccgtcggagcgacccagctgccgctgaacgagtacgccgtctccttcggttcctattcctcagcgaaagtaatgggctacaacaaagaagatgacataaaagcactgaataaaaaagaaacagagctcatagaggcgggtatcggcgagcaaaaggattttgaaggcaaagatctgaagggaaaagtcgctgtcgtcaaacggggcagcatcgcctttgtggataaagcagacaacgccaaaaaagcgggcgcgatcggtatggttgtgtataacaatgccccgggagaaattgaagccaacgtaccgggcatgtccgtaccgacgattaagctttcatcagaagacggcgaaaaactcgtcagccaattaaaagcaggcggcacaaaagcgacattcaatttatccgtggctaaatcgctcactgaacaaatggcagacttttcgtcacgcggtccggttatggacacgtggatgattaaacctgacgtctccgctcccggcgtaaacatcgtcagcaccattccgacccatgatccggccgacccgtacggctacggatcgaagcagggaacgagcatggcttccccgcatgtagccggcgcagctgccgtcatcaagcaggccaaaccgaaatggagcccggaacaaataaaagcagctctcatgaacaccgcggaaaccttaacggacgcggacggtgacgtatacccgcataatgcgcaaggcgccggaagcatcagaatcatgaaggcgatcaaagcagactcccttgtcgccccgggaagttattcttacggaacgtttatgaaagacaaaggcaatgaaacgaaaaaagaaacctttacgattgaaaaccaatcgtccatcagaaaatcatatcagctcgagtactctttcaacggcacgggcattaccgtttcgggcacagaccgggtcgtgatccccgctcatcaaaccggaaaggtcaatgcgaaagtaaaggtcaatgccaaaaaagtaaaggcaggcacctatgagggaaccgtcacagtgcgtgaaggcggaaaaacagttgcaaaagtgccgacgctgctgattgtaaaagagccggactatccgcgcgtgacgtcaatcgacgtgcaggacggcacaacgcagggaacctaccaaattgaaacctatcttccggcgggagccgaagagcttgccttccttgtatatgacagcaatcttgactttgtcggccaagccggcatctacaaaaagcaggataaaggctatcaatatttcgactggaacggcaaagtcaatggtgacaccgcactgccggcaggagaatattatatgctggcctatgccgcgaacaaagggaaatcaagccaggtgctgactgaaaaaccttttatcattgaataaccgaacaaccctgctggagcatcagcagggtttctttctgatcattcggcaaaagcttcacgaagcagccggtatgactgaagtttatcttcaaagtgatgagtaatggtcacagccatcacttcttccgttccgtatgctttactgagagccagaatctgttctttcacttgttgcttcgttccgatgatcattcgattccgattatcggcaattcgtctttgttcatacggtgtgtacgtattgccgcggacggtttcgtaagacggtacgccgtgaagcggaatcccctgttcacccgcaagcagcgtataatccatgacggccgcgagttcctccgctttctcctccgtgtccgcgcacagcacaaacaccgccacggctgtttttggttcttttcctaatacagaaggtttaaatctgcgcttatattgtgctgtcgtgctttctccgccttctccattaataaagtgagcaaacatatagcctgctcccatttctgcgctcagaagcgcgctttcccccgaagaaccgagaagccagacttccggcgccgtcttaataaggggtgatgcggtcagattcggaaaacggtgattgtcgtcggctgcatcatgcaaatacatcgccagctcacgaagctgctgcggatattgatcagcgttacgcttcccaccgtcattcagcgcccatgatgcgatcggcattccgcccggcgctctccctaatccgagatcgattctgcccggcgtcaacccttcaagcacgcggaaattctccgccaccttatatgcgctgtaatgcggaagcatgacaccgcccgagcctacacgaatctcattcgttttcgccgcaatatggctgatcagcacttcagggcttgaacccgccaaccgctctgaaaaatgatgctctgacacccaaaacctcttatatccaagcttttctgcctcctgcgccagtcttactgtatcccgcagcgcgctttccgcggaactcccttctgatacaggagattgatctaatatgcttaatgaaatcatcactgtcacctcatcaacatcgtaccactgctaagccgttttttctttctgtatgcttataagcatccctgatgataaacatttatataccttgttccattttgtcgaaatatgttacacgtgaaacataaaaacctctcccggtcaggagagtttttttcttaattcttttgaaaacctttatcttttacatattgatttaaataggttctcggtttttgtttcatgaactgcaggatttgatcagaccatgtttcaacccgcttgccgtttgtccgtttatcataataagcggcaatggtttcatcatattccttcatataactgcggaagtgttcttcattcgtatcgtacgtgttttcatgatatacggcttgtttcggcaggcgcggcttttgaccggacggatgagcgggatgaccgactaccaagccgaacagcggcagcacatggtcaggtgtaccaagcacttccgtcacctgatcaagttcatttcgaatgcctccgatataacaaatgccaagtcccattgattccgcggcaacacttacgttttgtgcggcaagtgcggcatcaatgacgctgaccataaacatttctgtattctcaagaagctcggtaatgttttcgcctttttcctcagcaagttttttatgacggtacaaatcagcgcaaaacacaaacaagtgcccattattctcgacgtaaggctggtttccggccagtgccgccagcttccgctttttctccttatcagttacgccgatgatggagtaagcctgcacgtaactggacgttgacgccgcctgggcgcttttcactaatgtatctatctcttctgctgtcagaagctcgtcagtaaatgatcggatcgaccgatgattaagtatggtttcgatggtattgttcatataaaagcctccttctttctatatcatatccgaaagggaatcatgtcaaaagcgaaatgctctaaacaaaaaaagacagcccgaaaaacgagccgtctcacattaagaattgaacaagtagcttttatatttcgtcagctgcacacttgcgttatatacgatcccgaagctgattaatgtagaaagcaccgagctccccccatagctgacaaacagcagcggaataccggtaaccggcataatgccgatattcatcccgatgttctggaaggtgtgaatcacgataagtgcagtaaatcctacgcaaaaaaacgcgccaaatcggttaaacgcatgcaagcggtcaatcagcaccacaagcctgtaaattaaaaagaaaaacatgacaaccgcaatggcgcagcctaaaaatccaaaactttcacccaaaatcgcaaagataaagtcggtctgtccctcaggtacgtacaccttcagattatgaacgccgtttccggtaatgccgcccgatccgatcgccataacggcctgatccacctgccagcttttatcgctctctgcctgagtcgttgccgcactggagtcagacatccacgatgtaatccggttaatttgataatccgcaatgccgattgaattcgccacatggggaaattcaatcaccagcactaagaaaaggccaagcacaagcgcggccgaaccgccgatgatggtgatcagcttccagttcacacccgacataaacaccatcaccataacgataaacagacagatcgcacccgtaccggcatcctgcaaaacgatcatcccgatcggaataaccgtccatgccgcaattttcaaaagcagattcacatcttcccgaagtgacctttgatccttcgggcccgccttcgatataatggacgcgaccatcatcataattcctattttcgtgaactcagagggctggagggtaaagtttccgatttgaaaccagctcttcgctccgtttttaatcggcgcgatggattccggcgccacacgcaaaaggagcagcgacagcacgccggcaatcaatacgtacagactcagtttttcaagctgctctaaatcaaagtacagcaataatccgatgaatcccgcacctataacatagaagacaatctgtttcatccaggcactgcctccgtactgcccgaactgtccggccgcataaatcgctgcaacactaattattaaaaacacaccaaatataaaaatcaaatccccctgataatagggattttgctgtttcttatatcgactcattctatcccgccttacattttcatcggaagtcactattgtttattatacatgaacaccgttcaagaaaacatgatgaggttgcttcctttttattttttacggtttggggactacacgacatatgacgtgtcagaaaaggaaatgtttcggtcatgatgaaacttttccgataaaaaaccccttctcgtcagaaaaggggtttcagcctatgtttaacgtcataaacaagctgttcgggtcctctttataatgtgcaaacggatcacaatattgaaacccggctttttcatacaggcgtctggcggggagaaaagcctccatagaaccggtttctaagctgatccgctgatagccccgccgccttgcttcttcaagcatatggcggaggatccggttggcaacgccttttctgacatgatgcggagaggttttcattgatttgatctcaccgtgccggctgtttagctcctttaaggcaccgcagccgagcaggatgccgttttccctcgcactccaaaacgtaacgtcaggctgacgcagccggtccgcattgagcgcatgtatactttccggaggagaatgcatggtcatgctcttcagatgatcctgcaaaagcgcaaagacatccggcgctgtgacatcttctttccttacgtccacttcaaaccacccttgctgtgcatattttctttgaccatagcaaaggttcacagcctgcgccattccattgtccggaaatgtgacagggtatttggcctttccggtttcttgtacctatccaaaaatgaggcaatagttgcaatacttttctcgaaaaagcggtatcaaaaattggaaaacatggtataataattgtaacaaaatgttcaaaaaacgaccacaaaacagacacattttattctctgtatttcattttggaaacgctcccataaaatgaaaggagacatgtaagatggacatgttttttgcttatttactggtcgcaagcgcaacacccctctttatctggctggataacaaaaaagtcgctctttcggccataccgccaattattctcatgtgggttttcttctacttttacgcaaccagcagcctatcccctctcggccacacacttatgatcatcctgtttgccgtcaacgtcatcgttgcccatatcgccgcctttatcatttacggccttccgcgcctgcgccggagaagaagccaataaaggcacaaaaaaccctcttcgcataaacgaagagggtttctttttattcctgatgttcggaatgatgcttcgcaccgccaggagggtttccatccatatggtcgccgtgatggtagtgcgccgcaaagatccagatggaaccaaggatgataacaatcgctccgaaaaatccgaagagcgtgtttccgacttgaattccgccgttttcgctttctgtcatgtgcatgaacatgagaagctgaagaccggcttggataaatgcgaatccgaaaatgatccagagttttgctgatgggcttaattccgtatatactgcaacccaaagggccagcagggtcagaataatagacaacgcaaaacctacgatatgcttccacggaaagtggctgtgttcagcagatttgtttgccatattatagtccccccaatccgatgagatagacgcctgtaaagatgaagatccaaacaacgtctaagaagtgccagtataaacttgagataaagatttttgaagacgtctgcggcgttaatccgcgtttcttcaattgcagtaagatgccggcaatccagaagataccgatcgttacgtgcgttccgtgcgttcccagaaggacgaagaatccagaccagaaagcacttgtaccgagagatgctccttcatgtacatagtggatgaactcgttaagctcacatccgacgaagcccgcgccgagaaggagcgtaatgatcgtccaaatgacgacgccttttaaacttccgcgacgcatttcatgaacagcgatcccgcaggtgaaactgctgatcagaagcaggaatgtcatgatcatgacaagcttcacttcaaataattcagccggtaagactcctcctgctgttcttctttgaagaacgaagaaggttgcaaatagtgttgagaacaacacaatctctgcccctaaaaagatccaaaacccgagaatattgagtctgccggtttcagattgatattccataggcgcgttagaattgccgtgttctgcatgttccataaatcacgcctcctttattcggaaatctttctttccgtctcttttatttcttcaacaggtatatagtagccattgtcatattcaaatgaacgaagcaccatgcaaagcagaatgccgatcaaaccgacaatgcccatccagaaccattcaaatacaagtccgaagcctgcaataccgaacgccactgacataataagcggtcttccggagttgtgcggcatatggattttcttgaacttgctttccggatgaatatccgttttgtcttctttcaattgcaggtacgcatcttgagatttcacttcaggaagcaccgcaaagttgtaatgcggcggaatcgcagatgaagtcgcccactcaagcgtacgtcccacgccccatgaatctccgctgatctcgcgagtagagtagcggaagctgtagtagatgttgtagcaaaggattaagaatccgacacccatcatgaaggctccgacagttgaaataaagttcaatgcagtccatccgtcattcggtccgtaagtgtaaatacggcgaggcataccttgcagccccaagaagtattgagggaagaaacatacattaaatccgatcataaagatccagaagaaccattttccgattctttcgttcagcttgtggccgaacattttcggataccagaaaataaatcctgcgaaacatgcaaataccgtacccgcgatcagcacatagtggaagtgagatacgaggaagtacgtattatggtattgataatccgctgcagccatcgcaagcataacccctgttaccccgccgacaacgaagttcgggatgaacgcgagcgcccacagcatcggtgttgtaaaactgatccggcctttatacatcgtaaagagccagttaaagattttaaccccggtcggaaccgaaatcgccatcgttgtaatcgagaagaaagagttaacagacgcactgttccccattgtgaagaagtggtgagtccatacaaggaaactcaggacggaaatggcgataattgagccgaccatcgctttgtaaccgaataactgctttcttgcaaacgctgaaataatttcagagaaaataccgaatgccggtaagataacgatatatacttcagggtgtccccaaatccagaacaagttagcccaaagcatcggcataccgccggcttccagcgtgaaaaagtgagcgccgaacaaacggtcaaatgataacagcgccaatgccactgtcaaaacagggaaggcgaatacgataataaccattgtaatcagcgtcgtccatgtaaacatcggcatacgcatcagcgtcatgcctttcgtacgcattttcaggatcgtcaccataaagttgatacccgtcatcagcgtaccgataccggcaatctgaagaccgagcaggtagaagttctcaccaggcccgggactcatgtcgttgcttgccagcggcatgtaactcgtccagcctgcgttcggagaacctccgataacgaaagaaatattgaaaagcatcgcacctacgaagaacgtccagaaactcaggttgttcaagtaagggaatgctacgtcgcgcgcaccgatctgcaaaggtacgacaacgttgatcagaccgattaaaaacggcatcgccatgaagataatcatgatcgtaccgtgagtcgtaaagatctcattatagtggtttgagtctaaaaaactgttattaggaagcgctaactgggcgcgcatcatcaagccgtcgaccccgccgcggaacagcatgataacagcagagataatgtacatgattccaagtttcttatggtctacagacgtcagccattcagaccagagccatttccactttttgaagtatgtgagtacaacgatgatagcgatagtggaaagcgcaatggaaacttgtgcgcccagaattaatgggtcacctgttacaaaaaattcatcccatctcaatttcattcgggcttcctcctttcttgttcaatttcaatcttgtttatcgtcggatactttaaattcgtttttctttacattttcccacggatctgttttagagtgcggtgatacggctttgtagccaaggcgtttgcgcgcctccatcgcatattcggcatcttggccgtggtcaacgtattttaagtgtgtagaagagaacgttaatttaccgacattctccggaagcatcagttcgtcatacttctctttcgtcagctttggagaatcgctttgggcttttttcacccagctgttaaagtctttttgcgtaacagcttttacgttgaatttctggtcggcaaagtgttcgccggtgaagttcgcgttgcggccttcatatgttcccactttgtcagcctgtaagtattgatccatcagcattcccgccatcgcgtatttttgccccccaagctgaggaatccatagcgatgccattgaatcggctgaagaaattttaaataaaaccggacggtctacaggaatgttcaggtagttaaccgtctcaatatcctgctctgggtagctgaatacccatttccagtctaccgaagtagcataaacaacaagaggctctttatcctttgtcgcttcaggcgctttttctaacgaatatatcgtctgtacggtaggcacagaaagtgcaataacaattaaaattgggatcactgtccagactacttctaagaacgtgttgccgtgcatctcgggcttgtaatttccgctgtctttgcctttgcggtcgcggtacttcactaaaatgattgtaaatagtacgaaaacgacgccgacaatgaacagcataaatccgattgacaagagaatcagatctttctgctggtctgctacaggtcctttcggatctaaaacggaaatgtcgctgcatccgcccagtacgaaaacaacagccaacatcgctaataaaagtaacggtttaaatgctctgaacaagaagatcaccatccttcctattgatgtagtgaatctgaaatgtactttctcaaaatcttttctctatctaccttgttatgctatcaaaatctgcccttattagctttatttttttctaaagttcatctttttttcgacctaatgtcacaaaatcgtcaaaaaatgcatgaactttttccacttgcgcaaaccaaacataaaaagttttagatcatttagcatatatagagaaaaaagatagtgagaacgaataataccaaataaaggtttaccataataaaaaacgctggtcaacaaaaagattcattttgttaaacattctacaaaagaaatattttttcctttgttcacaccttttcacacggtttccattttaacgcaacgcattgtgaaaaaaaagaccggaacgcgccttgatatgttcattataaaaaacacattcatatgtttaatatggacaaaacgaaggaaacatataggcataaataataaaaaataggaagtgatatttatgggttttatcgtatctctgattgtcgctattattatcggctggatcggaagtttatttgtaaaaggcagtatgcccgggggaatcatcgggtcaatgatcgccggtctgatcggcgcatggatcgggcacggactgctcggcacatggggtcctcaccttgccggctttgccattattccggcaatcatcggagctgcgatcgtggtgttcttattcagcctgatcgccagaagcagaggataaaaaaaaagcctcgtcccttatgggatggggcttttttccggtagagcgcccaaatggcggataaaccgccggaaagccgctctgccttcttctgtttgtttaaagacgccggcatgctccagtatccgcgcaaaggcatggccgatttcctctttcagaatctgttccgcgttttctttcgttaccttccgcttatgcagcacactgagcgcccaatctttatgcgctgccgcagaagggtctgccgttaagaccgcttccgggtccggtgagcacagcgcttcagccgtgtatttcatttcttgttcaaggcggcccggcagaatcgcaagccccattacctcaatcagtccgatattttcttttttcaggtgatgaacttcctgatggggatgaaaaattcccagcggatgctcatcagaggtgcggttatttctgaggacgagatctaattcgaataaaccgtttctccgccgggcaatcggcgtaattgtattgtgcggtgtttctcctgaatgggcgaggagatcagccgcctcatcggaataaccgcgccacgcccgcatgatggcatccgccgcgccggaaagctcagacgcactctcgctttgcaggcggatgaccgacatcggccacttcacaattcccaacaccgttttcggatagtcaggcagcctgtaccggctttctgtctccgcccgcgccatcgggaattcataattgcccccctgaaaatggtcgtggcttaaaatactgccgccgacaatcggcagatcagcattggaaccgagaaaataatgaggatactggctgacgaacgacagcagccggtcaaacgtttttttgctgatcttcatcggttcgtgccggtctttcaaaacgatgcaatgctcccggtaatacacatacggagaaaattgcagaaaccactgctcatcgccgagaattaccggaatgacacgaaggttttgacgcgccgggtgatccggtctcccctcgtacccgacattttctttacaaagaacacatctcggataatcggattgaggctgctctttggcagcggcaattgctttcggatctttttccggttttgaaaggttgatcgtgatgtccagctttccgtaagccgtctcagccgtccacccggcattccgctttattctgtccgaacggatataatacacatcctctgaaaatcggtaaaacgcctttgtcgcctgctccggcccgtgcaccgcctttgtttcttcaaaacgacggacaatctcggacggctgcggggcaaagcagcccatgatcttcgcactcagcaggtcgcgataggtgtctgtatcggctgcaatccggcccgtttctgccgcccattcataaaccggggccaatatgtccggcaatgatgccgccgatacattttctttctgttctggaacctccggatgggtgatatgcaaagcttcatacaaacggtttctcgtatattcaatatcaagaaatgaaatcagctctttttgcaatccgtaccggattaaacgttccacgtgccgctcaattgccatcgtcatccccctttagttctctcgctccggctccgacatccgccgtgtaaaagtcagcttttctccctgtcttctcctcatagcgggcccctgccgtttcaataaaatccgaaaccgcatcgtccttgacgatactgactgtacagccgccgaaaccggctcccgtcatccttgatccgatcaccccgccgtggcgccaggccgcttcagccagtgtatccagctcatgactcgtcacctcgtagtcatcgcgtaaagagagatgcgaatccctcattaattcaccgatatgatgaagctgattgttactgaacatgtcggcggcctctattgtgcggtgattttcatagacggcgtgtttcgcccggcgtctgttcacttcattctgaatcagctccgcatgggcgtcaaaagcggaaggggtcagctctcccagtgattgaacggaaagatgcttctgaagatcacaaagcgcttccccgcactccttgagcctcgtattatagcctgagtctgcaagcgttcgttttttattggtatttgcaataacgatcgacagccccgacagcccgagttttgtatattcaaagctgagcgtcccgcaattcagcagaatcgcatgatgtttctttcccattccgatggcgaattgatccattattccgcagctgacgccgataaaggaattttccgccgtctgagcgagcttcaccaagtcgagcatatccgcctcaagctcatggcattccttgagaatgaccgccttaacaagttcaatcgaagccgaagatgacagccccgctccgttcgggatatttccccagaacacaatatcgaagccgtgcggaagggaaaaaccgctgccgagacactctgccatgacccctttcggataattggcccacccgtcctctttttgataacggatattatcgagactgcattcctttatgcccgcatctttaaaatgatgagagtacattctgacgagcctgtcccctctctcccggacggctgcatatgtaccgatcgtcagtgcgcaaggaaagacgtggcccccgttataatccgtatgctctccgatgagattcactctgccgggcgcaaagaaaatgcgcaggtcctccgattccccgaatacatcagcaaacgctttctttattttgtgcttcatacgcatcccctttcactattacactttcccccggggcgcggaaagaaaccgttatgacacgccctcttctttcgcttttctgaagacaatccacttgctggccgcatagttgacgactacgataatgacgttatcggcgattttcgccaacgtttcgttcatatgaaattgactgaccagaagaatcatcatggcgagatcgatggctagagacaatacccgcacgctgaaaaaggccgtcaattctttcatcagactccgcatccccgcggtcttttgctgaaatacatacagtttattcgtgacatatgcaaatagaacggacagaacccaagcagcgacagtcgccgccttgtaatccatctcaaatgccgacgtcagaaagtaaaaactggcgatattcacgatggtcgtgaatatccccataatgatatacatcataatttctctgtagcgcatggcagttcctcgctttctgaaagacttttctaaaccttttgtcaaatcaagaagaacgttaccctgattttctgccgctgacaaaaacatagagcgcgtcaaacatgctgcggaaagtaaccggccttcccagcacattggattgcttaatcatcccgtcgatgagcgcgcacatcatgttagcggtatgctcggtatctatatggtcttctattaaatttctcgatttgagccaatttatgtacatggtgctttcttctatccataacttataaagacggatataagcttcatattcactgacgactttgtaagtaggcatatgaacggcaaaagacacaacattccaggcaggcttgctgtttacaaaccgcatcagcaggctggccgcgcttgccgcagcttcacaaagcgtcaacggccgcgctttttgcttttctaattcatcgagatagccggtgatgatcctttttttaatctgacgcctgtctaataaatgcttcagaaaatcttccttgctttcaaaatgaacgtaaaacgcgcctttgctgaaacccgccgctttactgatgtcatcgattgagactgaatcgtaagctctttcaatcaggagatgaaggcctgcgtcaataaaactttcaaatgtttcttctctcttaatttgaaatttgttttttttcattttttaccccagctgtttgatcattcactttatcttacaccgaatcattcttttgcggtattttttatacaaaaagaatatgctagtcgacgctttgagggtaaatgttaataggtcatatgatttatttttatttgcatactatccagtcagtatttatttgtttattattatacgtaagaattcttgaaggattttggttatttcagtcattttcttagggaataggtaggtgaattcatcttcaatttgggattaccggccaactatgtgtgatatttgttatacattggctgctgtagctgggcaaatcaatttttcaattggaggttcttatgaaaactcatgtaatgaaagatatagatcaagattggcaattgttaattcaagaggctagaatcatgggtttgcacattgacgatgtgaggcgcttcttaaatactgaaaaagcggtgaagaaaaaaacaccaatgaaaaacaccatccgccagcggtaagattacaggcggatccttttactatatgacctgccacagtccgcccgcacccgagttttcaaaggaacagccgcaataagaggggaatcagagaacaaaccgtataccggacaaccattcccgtccgcattccgcaattgaacagccaaacatggtgatatgagatccccccgctgcatatcttgtgtatatgcccatttatgaggtgatacacagatggatacgaatccctattatgatgaaaaacaacagaactactacgaaggcctgaatccttatttattgaacaaaatagacgaaaactggcggacagtgcttgatgtcggctgcggcacaggcaatttaggagcggcgatcgaagaccgcggaataacggtttacggcattgaagcgtatcccgaagccgcaaaaaaggcggaaagcaaattgagccacgtgctttgcggcgacattgaatccgccattcttccgtacgaatcagaacaattcgactgcatgctgttcggagacgttcttgagcatcttatcgatccgtggtccgtgctgaaaaagcttcgtccttatgtaaaaaaagacggcacggtgcttgcatgcataccgaatgtcggccacatctcagtggtgctggagcttttagccggcaaatggacttacagtgacgccggattaatggatcagacccacctgcgttttttcacccgcgaagagacgctttcattatttaaatccgccggctatgaggtgaaacgcattgaggcgatccgcgttgatcacccctcttatcacaaagccatcgcatcattgcacgaagtatgcgtacagcttggcataaggcatgactttatggcagaagcatcggcgtatcaatatgtgattgaggccgagaggagcatgtaatggattcacattcatttctgtttgtcgtctgtgtgaatgacgagccgctgtactcccggtgcaaaagccatatcatgcagcttaccgtcccccctgcatactccgttgatatcatgccgatatacgattcagcaagcatggcctcgtcctacaacaaagcgctgagacacccctccaaatataaaatttatctgcatcaggatacctttatcattcatcagcatttccttcatgacatgcttcatatctttcaatctcatcaggagctcggccttctcggtgtcgccggctgcaaaaccctgccgccgaacggcatttggtgggaaagcggagagcggatgggaaaagtgattgaataccgggggaatgcttatcacccgctggactttgagcacggcgatgaagacggcctgtttacgcccgctgacgccattgacggcttgttaatggcggctcaatatgacgtggagtggcgggaggatttgtttcgcggctttcatttttacgacacatcacagtcgcttgaatttcaaaaacacggctatcaagtcggcgtcgcctgccagaaagacccttggtgccttcatttttgcggcgactcatttgacgccgcggcatatgaagcggacagacaaacatttgtcaaacactatatggcaaagccctctcgctgatcgagagggcttttttcgggttaacgtttattcagttcccgctcaatgatttgttcaaaggtttcctttcccgccgcgccagggattctctcatcgccgatgataaacgtcggcactgccgtaatgccggcttcctcataagcatggcggagcgcttcccgctgtacgtgtctgtacgctcttgtctcaagcgcctctttgaaggcagcgccgtcaagtccggcttcttccgcaagctttgtcagcacgccaacgtcaccgatattttgctcttcctgaaagaacgcctgaaaaacgcgtgtatggtattcgcttcctttcccatgttcctttgcgaaatgaaagccttcaaatgccaaatccgtgtaaggatgcggtgacacgcgggggaacgtgatttcaacgcctaaagactgcgccatcggctcaatggagtttttccacatctgccgcttggcgggatcattcaccggatcaagtttcggcgaggggctcggacgcaattcaaacggcttccattccacctgtacgtccttgtccttgattgcttcttcaaacgccgctttgccgacaaagcaaaacggacatacataatcagaatatactttaatctgcagtgtcattgtaagtctcctttccttttcattttaagttgtaacatatatagttacaagtgtttttttaaaaacaccctccatatggaaggtgtcacgattccagcagcctttgggcgatatattctccttttttacagccgccgggacaggcgaataaggaagagccgatcgtttgtgtatattcattcagcgcatcctttgccgccaaagccttcagcatcgggacaaattggcggtccgggtctttttgaaagcagataaacagcaggcctgcgtcaacatagcccgtctttggatcaattccgtccgtataggaaaatgcccggcgcataatctgtctgccggttgattttgccacgctgacatgcgagtcggcgggaatttgattcagcttcacgggatcggtttcctttttttgtccgaaaggcgcgcccgagcttttcacccgcccgaacgtgtgctcttgttccttcaaggatgaacggtcccatatatctaaaaacatcttaattttcctaaacgccatgtacgtgccgcccgtcatccagtccggctctcctgattgaacccaaacgatcgaattcatcaggttttcatcctttgtgctttggttgccggtgccgtctttgaatccgaagaggttgcgcggcgtttccccgtttttcccgccgcttaagaaacctttattgagaaaacggacttcgcatacgcctgctgcctgtttcatcaggttgcgcaccgcgtgaaacgccgtttgttcattatccgcgcagacttgtatgacgatatcaccgccgccttgattcttatcgagcttgtcgttaggcatcggcggaatatcggcgaggtgcttcggttttttatctttcagtccgaatcggtccttcccgtctttctcgaaaaacccggggccgaagccgaaggtaacggtcaaattcgccggggccagatcttgcgactccccggtatcctgcggaggcatatatttatttttctgttcgcccgacgggacggcgcctgaagtcagcagctgcgtcaggcttgtccattgtttgaaaagggagatgacatcggctttgtcgcttgacatgacatcaagcgccgcaaaatacacatacgtctgatgtgccgttgtgattcccgcttggtgctttccgtaaaaaggaacgatttgatcacgatcacgtttttcatcattcttctttgaagcggtggccgccggtttgaagagcggcgcgagtcctccgaggccgctcgctccgacagcgacggcggcgcccgcgacggcgccccacttcaggacatcccgtctgtggatctgtttttccttgttttgttcatcgctcatgctgcgtcttaactccttttaaagcacatcggcaatcttcgacatggtttcagaaagagccgtcagcttcgtgcttatctctctgatttgatctgtacttaatgtatcacaagacatatacgattgatcgcacgttttgtatttcgacatcaaaacttcaaattcgctgaattccgcatcaagtttttccgtgatctcgaaatggtctctccctgcgagcttttcactgtttcgtagagggcttttaagccttcggcgccggcggtgattggttcaggcatcactttgagcgaagcgatagagccgtcaaacacttcggtcgatattgcaagctgattgccctgttcttgacatacggcttatattctccaagtccgtcactgcctttttgcgcacacagaaaaagggccgccctatcgggacagccctgctttggagcgccgaatttcctctgaaaacttccgcgccgccgcttttggatcttcggcttggctgatggcgctgatcatgctgacgccgtctgcacccgcttcaatgacgggcgccgcgttgtcagccgtaatgccgccgattcctacaatcggaatggtgatgccctgacgccgcacctcttcaatcaatgtaacgccctgcacggcttcagcatctttttttgtttcggtcggatagaccgggcccattccgacgtaatcggctccggcttcttccgcccgcttcacctcggagacgttatgtgctgacacaccgagtatcatatcgccgattgccgctctcgttttttcggcgtctgcgtcatcctgcccgatatgcactccgtccgccttaaggcgcaaggccaattcgacatcatcattaatgatgaaaggaatcccggcctgcctgcagacatcctgcacctgcttcgcgaacaggagacgttcatcccctgttaaagaaccgctccccttttcccgaaattgaaaaagcgtagcgccgccctcaatggcttttttcaccacagaaacggggtctgcgcttgtattgtttgatcccataataaaataaaccgataacatatccttcatcatttcccgagaaatacgcgtcatttttctgtcaccctttcaattgcggcaagctcggccgcttcttgttctgagatgcttgccagcttgtttaaaagctcaatctggaagctgcccggccccttatgggaggtgtccagagcggcaagctgagcagcgcttccgtatacagaaacggctgaaacggccgcttgcagaacgtcctgccccgctgcgcagaaggctccgattacagacgtcagcaggcatcccgcccccgtcaccttcgtcagcagtttatcaccgttatgtacggcgtatgtgtcggtgccgtcggagatgacgtcggtttttccggtaatcgcaatgaccgtcttcagcccgcttgcagccgtcttagcgagctgaaccacatctcctccggcttcccccgcatccacgccttttatcttccaatcaggggcgccggctatattggcgatttccgcggcatttccgcgaatgacggacaagcggacctcctgtatgatcttgcgggctgatgccgtccgaaacggcgtggcgccggcgcctaccggatcaaaaatgaccggaacgccgttttcattggccgattttccggctgcgatcatagcttcaaccgacgccgaactgagggtgcctatattcaggacgagcgctcctgcgattttcgccatgtcggctgcctcctcaattgcataagccataacgggcgatgcgccgagcgcgagcagtccgttagcggtgaagttcgtgacgacattattggtgatactgtgaacgagcgggttttgatcccgcactttactcaagtgttgagctgcggtttgtgcgtccatgcttaatcatccttttttctctttttcggattccataaatacgatttcgtatgctccagccaggctctggcggcaaaggacatatagcggtctttccgccaaatgatggctaaatgccacggaatgaccggatgaacgagcggaatggttctgactttgtcaggatcaagaccgcggcagattctttccggcaagaggccgataccgagattggcggataccatttcgctgataaagtcccactgtgacgtttcataaatgacgtgaggcctgaatccggctttcacgcattccgtcataattcgattatgaaggacaaaatcctccctgaaaaatatgaacggctcttcttttaattcgtgaagactgcattctatctcgtcagcgagccgatgtgacggatggacgacgagcataagggtttccttgacgattgtgaacgtatgaaaaatctcttcatttgcgggaagcacgacgaccccgatatcaagcgagccgtcctccaccccttgctgcactttaatagagccgtcctcaacaagctgaaacgtcacatcgggatatgtgacgcggaagtcaccgagcactctcgggaaaaagccggacccgatcatcggcggaagaccgatgcggacgtgccctttcttcacttccataatatcgttcagctctgacgtcaggttttggaatgactttgtgatttcctgcgcctgcacatacatgctctgcccggcgtcagtcagttcaacttgccggccattgcggtaaaacagcttaatgccgagctccgtctccaggtttttaatcatttttgagattgtcggctgtgaaacatacagcgactgtgaagccttcgtaaagcttttcaaacgggccacttccaaaaaatacgttaagtgccggatatccattacatttcatcctttctatagacaaaaggaatacacattattctttatatgtattttacctatagcaaaaccttctgtacaatataaatataagggaggcatcattatgaaaaaattgctgcttaccgttattcaaatcgctctgctgtttatatttgcgcgtctgatcaattgggtcacggcggctcttcatataaatattcccggcagtataatcgggattgtgattcttttcacattattgcatttcaagattatcaaacttgaatggattgagcttggcgcagcatggctcctcggtgagctgctgctgtttttcatcccgtctgccgtcggagtgattgaatacggagatattatgtctaaattcggcgtaagcattttacttgtcgtcgtcatcagcacatttgtcgtgatggtttcaacaggtacgcttacacagctgatagcaaaaagaaaggagaaaaaacaaacgtgttcatcggaatcataagtttattcttaactgtcttagtatatttgggcgcgaaaaaactctacactcgttttccgcgggtgtatacgtcgccgcttctgattacgcccgctgttttggtcgtactgctgcttcttgtcaatgtcccgtatcagacatacaatctcggcggcggactgctgaccgatatgcttcagccggcaacagtggcgttcgccatcccgctttataaatatttcccgattttaaagaaatacgccgtggaaattattttgaacgtagcggtcggttcatgtatcgccattctgtcaacggcctttatcgcgaaatggttccatctcggcagcagcttagtcgacagtctcgtgccgcgatccgtgacgacgccgattgccatgaacgtttcagaaatgatcggcgggatgccggccgttacagcggttttcgtcattttaacggctttattgggaacgatcatcggaccgatggtcatccgctatttccgcattgataacgaaattgcccggggcgtgctgctcggaactagcgcgcacggagcgggaacatccaaagcatttgagctcagctccgtatcaggaacgatctcaagcgtgtccatgattctcgccgcaattatgacgctgtgcgcggccccgattttgctttcgtttatgtcataaaagactgctccttacagagcggtctttttttatttgccactcagatggatttgtctgtccttcataaaaagacgaaaacacgatatgataagatatgaagtgaaaagaatgaagaacggatgtgtcatatgaacggccagcagcgaagcagcatcagaaaaggacttgaagtcgatatcgtcctgaaagccgatcagcgttcaggaaagctgacaagaggaatcgtgaaggatattttgacgaactcaagcttccacccgcgcggcattaaggtccgccttgaagacggacgaatcggccgggtgcagcacattattgaatagaaaaaagccggagcttcagggactgaccccataatatgagacaaacaaaaaacaccttcaagtttgaaaacggatcgttgttatccgaaattagacttggaggtgttttttctatggggacaagagtgagttatccggttgaagcgaaacagaaggctgtagaaatgagattggcaggcgtacctatgaaagagatcatgcaggagttgaatattaagaataagacacaggttcagacatgggttagatggtataaggctggtgatacacatcgattcgaacagcctgttggaaagcaatacacttacggaaaaggtccggagtattcttccgatttagagaaactgcaggcagagattcgttacctgagacaacagaatgaagttttaaaaaagtacaacgaattggaaaggaagttgatagcgaaacgtcagtcgaacttgtagaaatattgcacagcacaatgaccgtacaggatatctgtattcatttaggtatctctcgagcgtcttattatcgttggaagaagaatctgatgaaggatcatcccaagcgccatttggaaaaacaaatcggcacgttgtgccgagagcacaagtatcgatatggatatcgaaaaatcacagccatactaaaaaagagaatgtgtattaaccataaaacggttcagcgcattatgcagaaaaatcaatggcagtgtcgggttaaggtgaaaaagcgcaagaaggatgggcagccatatgccgtggtccggttcagcgcattatgcagaaaaatcaatggcagtgtcgggttaaggtgaaaaagcgcaagaaggatgggcagccatatgccgtggtcgataatatattggatcggaactttcagtctgatcgtcctctggaaaagctagtaacggatatcacatatttgccttatgggcagaaacaattgtatctttccagtatattggatttatacaatggagaagtgattgcttttacgattggcgatagacaggacacagactttgtcttacacacacttgatcagctgcccgcactgccagagaactgtgtgttacatagtgaccaaggttctgtttatacatcttatgagtatcagaaagctgttaaaacaaaaggcattaccatgagcatgtcccgcaaagggacgcccgctgataatgcctccatcgaatcgtttcattcctcactaaagtctgaaacgttctacctcgacaggttggaaagcactacgacgaccatcgtagaacaaactgtcgaaacctatatacactattataacaacattcgtattcaaacgaaactaaacaaccagccgccggtcacataccgacagctggctgcttaaaggtgttttgatccctgtctcaaaaacgggggtcagtccctcgtttcagaggttttttgtttaaagatcggcaaattacataaggtaatgaaaaatctttctaaaaagacctttaaaaattctcccaatatcattagaataattacgtactacatttgagaggcagaaggaactatcttatgaaattaaaactgaagaaattcatacagatcttgtcgccagcacagctgattgcattatattattttcttgctgtgacggtggcatttattttgctaagtctgccggccgcccacaaacaaggggccagctggtcgtttatagacgcgctgtttacggctgtcagctcagtcagtgtcaccggtttaacggtcgtcaacacggctgatacattcagcacggccgggattgtcattttggctttcgtgcttcaattcggcggaatcggcatcatgacgctcggaacattcgtctggctcattatgggcaaacggatcggtctgcgggaacggaagctcataatggtggatcagaatcaatcgcagttttccggtatcgtcaacctgatgaagcaagtgctgtttttgattttattaatcgagtttttaggcggcatcatcttaggaacatattttttaacgtattatgattcgtttgaacaggcgtacttgcacggattctttgcgagcgtcagcgccacgacaaacggcggttttgatattacgggaaattcactcgtcccgttcagacatgactatttcgtgcagtttattacgatgcttctgattattttcggtgcgatcggttttccggtgctcgtagaagtaaaagactttttgttttcaaaacagcgcagatactcattcacgctgtttacgaaaattacgaccgttacgttcggaatgctcgttttgttcggagccgtgggcatttacgcgcttgaagcaagcaatgtcatgaaggggaaaagctggcatgatgttttatttttatgtctctttcaatcaaccgctacgcgaagcggcgggcttgcgacaattgatatcagccagctgtcggcgccgacattatttttcatctgtgccctcatgtttatcggcgcatcaccgagctcggtcggcggcggaatccgtacgacgacgtttgcgcttaaccttcttgccctgtttcattttgcccgggggaataaagcggtcaaggtctttaaacgcgagcttcaccaggctgatgtcatgaagtcgctggtcgttacgatgatggcgattctgctcgtgttcggatcgacgctgattctggccgtgaccgagaaaaatcagacgctcctcggactgctttttgaagtgtgttccgcattcggaacgaccggcctgtcgcttgggattactccgcatttaagcgacatcggaaaatgcgtcatcatgattgtcatgtttatcggccggatcggcattttgacgttcctttatctgatcggccgaaaagaaatcgaagcaaattatcactatccgaaggaaagaatgattatcggctgacaccgctttttagaaagcggtgttttttattgccgtaaaatggatgagtggaaacagtttctttggagattctacttgtaaagaggtgacgtcattgtttgccgtattttggaagtcggtagttatgatagcggtcggtacctttttattgcggattgccggacggaaatcaatcagccagctgtcggtgacccagacagtcatcatgatttcgatcggctcgattattattcagccgtttattgaacataatttatgggaaaccattttcgcggcggcgatttttattgcggtattaatcctgatggaatatttagaaatcaaatcaagcttttttgagtttttattttcaggaaaaaccgtcgctgttgtcagaaacggaaaaatcatcccggaaaatttaaaaaaaatgcgttttaccgaagctcagctgtcaatgaggatcaggcaggaaggcctcggagacattcaagattttaaatatgtgctgcttgagccgaacggacagatcggctatgaactcattgatgaggccaaaaacgtgacagtgcgtgacttaaaaaaaatgcttgatgaattcaaaacagatttgctgacagaaggaggaaatcaaatgaaacgcaaagcagcaaagaatgaagctttgaccaacaacaacacaccgactgagagcatggacaaagatgcatacaaaacacaatatgacggtgatcccggactgagaggcgcaaaccgcaaatcaaaacacggcaaacaaggaggcgagtaacatgacgaaaaaaaaccgccacagcaaagacatgcaaaaccataaaaagccgatggaccctaaattgcttgaagaagagtttgcaagcgagctcggtgattataacgccggaaaatggattgaaacgcttgaacagacgaagccaaagaaaaaagaagacggcaaacaataaaaaatacctcttaggcggcaacgcttaagaggtattttgcattatttcgaataagcactgtttcttgttcctttcaccgcttcaagccagccggtgatccgcagctcaataaacggctgtgcggccgttttcaccgcattgctggagagaatggacgtaagagcggccgttaaaattaagagcatgactaaattctgataatcagataagtgatcttcaagcccgatctgccgcagcgtttttataatgaatccatgcagcagatacacgtaaaacgttctcgtaccccatttcgtaaagaaataacgcttttgcggaacgagcgctaaaaagctgaaagtggcggcaaaggccaaaacataccagccgatgcgcgacagaccgctcaacagcgacactgtgccgaatgtagaataaggctccgatccgaacagccacgagtaatcaaaatcaatacaccagcataagaggaaaacaatccccagtacgcccgcggcaatctgcctgcctcttttagcccgaagcaaatcaaagtgctgcttctttaaataaaacccgacgagaaacatcggtagaaaaacaaacgtccgtgaaagactcagcgtgctgctgataaaatcaagatacccgatcatgacggcaagcccgcagctcgccccaagcgcccacattttcggcagcttcgtaaaggggtaaagcagcagattccaaaagaataagctgactaaaaaccagagagaccactgcggatcaatcggattgacgcttgccatgctttcatcctgaatcaaatagtaaaaaactgagtaaatgccctgaaaaatcaagtacggaataatcagcttcacagccagcttcttcacataacctttccgcttaaagttttttgcgaaatagccggaaaccaggataaaggccggcatatgaaaagtataaatgaatttgtagagatggagcataaactcatttccgttaataaatgaccggaggatatggccgaacaccaccagaaaaatcaagataaacttggcgttgtcaaagtaactgtctcgcgattttgtcatagcatcaccttctcttcaaaaatcatccactgcatgattatttcctgttggtgttcattttaaaataaaaaacaaaaaattgaaggaggacaaaagggattgttaggatgatgtaatggggaggtaaggatcgtagaaaaagactttaacttgtcatatcattgaaattttctgaaatgtatagggcgaatgaaggaagatgaggtattttgtagaaatattgaaggataggtttttgaagaaggagtgtactgaatggctgaaactctggatttgcaaacaaaagactcgctgaaagagcagctgaagcggatgaaagaggaaaatgaccgcctgaagagtgatttgaaccggtatcacgtgattatgaataacacgcttgatgccatttttatatgccgtaaggaaatgaaaatcgtccaggcgaacgaggctgcggcccggatgatgcagattgaggcagagagcctcattaaccgctcagtcctggattttttatattccgtgcctcaggaagaactgaataaggccgtgaaaaagtttttaaaaaaaggccatctgtggaaagaggtgccgattaagcttgacagcggcgcgacgaaatacattgaattcctcgccagagacggaattggagaggattatttttttgtggtgatgagggatatctcctctaaaaaaatattagagcgcgaattctccatgaacgagcagctgtttaaagatttgtttgacagggctgtcgacggcatcgtgctgtttgataaggacggcgggtttattgatgcgaacctctctttttgcaaaagctttgagatcggccagaatgaattgtcccatctgtcgctccgccattttaccgacggagaaaacaaaaagcatctgaaagaaatctgggaaaccctccgcagaaaaggaaacgccaaaggagaactgcccgtcaagcttcggtccggcgaagagaagctgtttgaatttacgattacgtccaacttaatcagcgggttctacatgtccattatgagagacataacagagaaacggttgatggaattgaaacttttcaaaagcgaagagcgattccgcgaaatttttgaaaacgccatggacgcgattgtcatttggtctgatgacggaaagattgccaaagcaaacgaatcggcgtgccgcattttcgaactgccgatggataagctggtggagacgaatttatgtacgtttatcgttgatccgcagaaaaaatataagcagattaagaaaaaatatgaaaaatacggggaaatccgtgaagaaatgctgtttcagatggcaaacggccaatttaaagagctggaattcacatcaaaacgaaccatacttgaaggtcagcatttaaccattttaagaaatgtcagcgatcgtaagcggatggaaaaagaattgcgggaaagcgagctgaaattcagaaaagtattcaacggctcaatggacggcaaggtcttatttgacaaccaattccgcattattgacgcgaatcctctcgcaagccgtatactcggtatgccggatgaggagctgagagcgtacaccgttccggatattctttctttatttgatattgaaaacgcgggtgttcccgccagaaagattgatttagaaggaatggataatgaaatccccttcctgttaagcagcagcgacagccgcaaactggaattctccttcaaaagaaatatcattcaaaatatgaatctggccatctttaaagatgtcacagaggccaaagagcttgaagagaggctgcggaaatccgacactcttcatgttgtaggggagctggcggcgggcatcgcccacgaaatcagaaacccgatgacggcgctgaaagggttcattcagcttcttcaaggaagcattgaaggcgaatattctctgtactttaacgtcattacctcagaattaaaacgcatcgagtctatcatcactgaatttttaattttagcgaaaccccaggcgatattatatgaagaaaaagacgtgacgcagattatgaaagacacggctgatcttttgaatgcccaggccaatcttgtcaatgtgcagatccatctgaacctgaccggaaacatcccgccgatttactgtgaaccgaatcaattaaaacaggtgtttatcaatattttaaaaaacgccattgaagtcatgccgggcggcggcaatatctacgtgaccattcagtcttctgatcaagaccacattttgatttctattcaagatgaaggaacaggcatttccgaagacaaattaaaacgtctgggtgaaccattttacacgacaaaagacaggggaacgggtctcggtctcatggtcagctataaaatcatcgaagaacatcagggacgcattcatgtggaaagtgaagaagggaagggcaccgtttttcatttgacgcttccggtccggcagaataccgaagaaagaaggagcggggaatgatctgttttacaagtgtgagagcgccgtttggaaccgtcatcgtaacagaggaagagagctttattaccggcctgtttctcaccggggaagattttgaggaatggcggaaagacgcgcccggcgtaaagccgtgcgaaaccgctttgctgtcggaggcgaaacagcagctggcatcatatttttcaggagaaagaaagcaattctctctgcctctgagacaaaaaggcacaccctttcaggaaagggtatggaacgcgctgacgatgattccttacggggaatcccgaagctacggcgatatggctgaagcgatcggaaaaccgaaagcggtgcgcgccatcggacaagccaataaacgaaaccggctgccgattttgatcccgtgccatcgggtaatcggcaaagacagcgccttaacgggatacgcgggcacgaagacggatgtaaaagcggtgctgctgaacatcgaacaaatatcctataaagaaaaataaagcgtatggcacgttccgttttttcgcgtccgacatatcattttattaagtgaaaaaagttggtctgatgaaaaaggaggacgaagcctgatgaaaatgagccgtccgcaaaagatagccggttatgcagagctgttttttaaaatgcatctcattacagccgtccaaaaagatgaagtgattacattgtgcagacaaaaaaaccgctgacattgcctgaggcaatatcatcagcggtttttcagcttagctggcagtcagcgaataattgttcaatttcttccgtgtaagagccggtcacaattcctttctcggttataatgccggaaatcaggctgcccggtgtgatgtcaaaggccggattgaagaccggcacatcctcgggagcggtgcgtatgccggagatctgtctgacttcatccggatctctttcttcaatcggaatctgatcgccgttttcaatctgcaagtcaaatgtcgaaagcggtgcggccacaaaaaacggaatttgaaaggcgtttgccaaaatagcgagaccgtacgttccgattttgttggccgtatcaccgttttttgcaattctgtcagcgccgacaatgactgcagaaatatgtttttccttcattgtatgggcggccatgctgtccgtaatgagcgtgacatcaattccgccctgcatcagctcccacgccgtcagccgtgatccttggagaacgggtcttgtttcacatgcgtagatatgaaggccgagatctttttgtttcgctaagtaaaagggggcaagcgctgtaccgtaccggcttgtggcgatcgagcccgcattgcagatggtcatgatctggtcgccttttttaaaaaggtgcagcgcattttggccgatcatacggcatgtttcttcatcctcaatctgaatttgaatggcttcatgaacgagcgttgtcttcgcttcattgattgagatcgcatccctgatcgaatccgtcagtctgtcaagcgcccacgcgaggttgacggcagtgggccttgaactgtttaaatacgctttgacgtccgcgaactgacgtcggaaatctgaaaggtcgcgggcttcaaacgacttggcggagagcgcgagtccgaacgccgcggttataccgatggccggggcgccccttactttcagcgtgacaatcgcgtcgaatacatcttcctttgtttcaagttccacatattcagtgacgtcgggaagcttttgctgatttaaaatgcggatgtaggtttctttccattctacagaacgggggatggcaaattcattggtcatgctgcatcattcctttacacggagcttaaattggtccagaacctcggtgatatgcttcagttcttttctgttttcgatataataggcgccgatctcaagcgccagcttcttccgttcgattcgtttgtcaaacggagtgatttcatctaagtcagccacatgggcgagtccgatcgtgcgccggatcaattcgcatcccgcaaaaccgaccgcttcctcaaacgcgtttttcagtgtgtcttccagcaggtgtctgcgggaaggcaagcagtctttctcccatgcttcactgaatgttttcacaaatgtatcccatacggcggcagtatgatcatataacggctgtctgtcgtcaccgtcgcggctgagggcgtttaaaagcagattggcgataaattggccgatgtcaaacccgatcggtccgaagaaagcaaactcggggtcaatcacctttgtttcatgttcatctgcgaagatgcttcccgtgtgcagatcgccgtgaaccaatgtttccgcggaattcagaaagatggctttcaattcgtcagcgccttctttcagccgggaattgttccaaactttttctgcgtatgggcgcagctcctcttcaaaatcgtttgtctcatggtcgagaaacggttctgtaaacacaagcctttccgtaatattacaaagctcaggatttgtaaactgctttgcgagctgctgctttactttcgcatcaagcgcataatcggatgagtaaaagagcgttttccctaaaaattcaccgatatgaaccgataagttcggataatgctgcccttccagcagcccttttcttgaaatccgcaaatgcgagaggtcttccattaccgtgacggccatttcagtatcggaatagtaaacggccggaacgaggtgcggcacgtgttcgccctggcggatgagggcgctgctttcgattctcgcccggtcaatggtaagcggccagctttcaccgacgactttcgcgtaaggaatcgcctgtttgataatcagtccttttttgttttctttatcgtaaacatgaaagacgtaatttaaattgccgtcgccgatttcacggcatgtcagagtgcttttgctttggaataagccgagcttgacggctaacgcggcggcggagctttctgttaattgttcataaagacttgttttagttgctgacatggatttaccctccaattatgtagtggcagtaagagatcgtgacggagaatacgcccgaaaaaaagcctccttctctgaaagagaaggaggctgaaacagtgcagtccgcctcttatctctcagataacatctgatggaattagcaccgtgccttatgagacaatcgtctcggcgcaaaatgtacgcgccccatttcacaatggaattacggtcggttgctgttggggtcaaaaggccaatccctcgcccaactctcgataagagaaaaatatattgatttgtatcacaattcggattaatcagttgatgaaaatattagcaggtgccggatattcttgtcaacatttttttgaaaattaatataaatcacgccgcaagtcttggaaaaccggaatggttccccgcacgtccgcgctttctgacacatcgatttccgcccggactgcgccttccgtccggtctccttcggctaaaatccggccccacgggtcaataatcaggctgtggccggcaaattcattatcgggattggaccccgtgcagttagaggctgcgacaaaacattggttttcaattgctctggcgataagcaggcttcgccaatgatcaaggcggggcagaggccattccgcagagataaacaggacattcgcgccctgggacgtatgctttctgatccattcggggaaacggatatcatagcagatcagcccggcgcacttgacaccgtcaagctcaaaggaaccgtcgctgtttcctgctgacaagtaaaggtgttcatccatcagctgaaacagatgggctttctgataccgcttcacgatctgtccgctgttatcggcgatgtacatggtgttatagacattttcgccttctttgaccgcaaaagatccggcaacgaggtgtacgttgtatgtttttgccgtttctttaagccattgttccgaaactttgccgttttcatccgccagctggtctagccgtgtgagatcatagccggtcgtccacaactcaggaagcacgattacatcagcatggcggctttcttgctcaatcaaagattctgcttttttaaagttttctgaaggatttccgtatgaaatatcaaattgcaaacaggaaacggtccatttcattttttaacacctcaagtttctctttactttttttatttaaccatatatgatgatggactatcatttcaagacatttttagaaggtgaaaatatgaactttgaaatctcagatgtactcaaacagctgccggaacaatttttcgcatcattggtgcaaaaagtgaatcaaaagctgaaagaaggcagagacgtcatcaatttagggcagggaaaccctgatcagccgacgcctcagcatatcgttgaagaaatgaagcgcgccgtcgaaaggccggaaaatcataaatactcatcattccggggcgcttacagcttcaaaaaagcagccgctgcattttatgaaagggagtacggggtcacgcttgatccggaaacggaagtcgccgtgctgttcggaggcaaggcgggacttgttgagcttccgcaatgtcttttaaacccgggagataccattctggtgcctgatcccggatatcctgattactggtcaggcgtcgcccttgcaaaagcgagaatggaaatgatgccgctgacggaagaaagagggtttctccctgattacagtgtaattcctgaaaaggtgcggagcgaggcgaagctgctgtatctcaattatccgaataatccgaccggcgctgtggcgacagaggcgtttttcgaggagacggtcggttttgcggagcaaaacggcatttgtgtcgttcatgatttcgcgtacggagccgtcggctttgacgggcataaaccgctgagctttttgcagaccgaaggcgcaaaagagacgggaatcgaaatctataccttgtccaaaacgtataatatggcgggctggcgggtcggatttgccgtcggaaacgcttctgtcatcgaagcgatcaacctttatcaggatcatatgtttgtcagcctgtttcccgcggcgcagcaggcggcggcagccgcactttcagcggatcaggcatgcgtcgcggcgcaaaatgacagatatgaatcgagacgcaatgcatggattaaagcctgccgcgatatcggctgggatgtgacggctccggcgggctccttttttgcatggctccctgtgcctgacggttatacgtcacagtcgttttcagacctgctgctcgagaaagcggatgtcgcggtcgctgccggaaacgggttcggaaaatggggggaaggctatataagggtcggtcttctgacaagtgaagaaagacttaaagaagctgcggaacggatcgggaaactgaatcttttcacccgaaaaaacattgacatatcagaataacaatgcgataattcaaaatactttataaaatcattattcttatcaagagcaggcagagggacgagcccgatgaagcccggcaaccgactgataaagcacggtgctaattcttgcagcaggagctgagagataagattcggacataacacgaagcctctttctgctcatacggaagaggtttttttatgttttgcgaaagaaagagaggcgttcacgcatgagcgaagtattggcaacatatcttctgacagacacaacggacagtgaaaagcgggcggaacagattgcggcggggctgacggtaggctcctggactgacctgcccctggtgaagcaggaacagctcagaaaacataaagggcgggtcgtaaaagttgaggagaaagaaggaacctcagaaaacgaaacacaatccgtcatcaccatcgcctatcccgaggcgaacttttcaagagatattccggccgtcctgacgacggtattcggaaagctgtcactggacggaaaaataaaattgactgatcttgaattttccgaagggtttaaacgttcccttcccgggccgaaattcggtatatacggcatccgcaaactgctgggcgaatttgaaagaccgcttctgatgagcatatttaaaggcgtgatcggacgggatctcgccgacattaaagaacagctcagacagcaggcgctcggcggcgtggatctgattaaagatgacgaaattttctttgaaaatgaactggctccgtttgaaacccgcattatcgaaggaaaacaagtcctgaaggaaacccgggaggagacggggcataaaacgctgtatgccgtaaaccttacgggaaggaccgctgaattgcgggataaagcgaggcgcgcggcagaactcggggcggacgcgcttttattgaatgtgttcgcttacggtttagatgtgatgcagagccttgctgaagacagggaaatcccgcttccgatcatggcgcatccggcagtaagcggcgcgttcacatcatctcccgtttacggcttgtcgcatgcgcttttgctcggcaagctgaaccgctattgcggcgctgatttcagtttatttccgtcaccttacggatccgttgctcttccgaaggagtccgcgcttgcaatccatgatgaatgtgtaaaagacgatgtctttcatccgtcgtttgccgtcccgtcagcaggcattcaccccggtatggtgccattgttgatgcgcgatttcggcatcgatcacatcatcaatgccggcggaggcattcacggccatccgaaaggagccgagggcgggggaaaagcgttccgcgccatcattgatgcggtgcttgaagcgcagccgattgaagaaaaagccgcgtcgtgcaaagatcttcagctcgcattagacaaatggggaagggtggaagccgtatgacccgcacgccgctgattatttgtgatttcgacggaacggtcaccatgaacgacaacattgtcagcatgatgaaagaattcgcgcctcctgagtggcttgaattaaaagacggtgttctgtctaaaagcatatcaatccaagaaggagtcggccggatgttcggactgctgccgagcagcttaaaagaagaactgaccggctttattctgaaggatgcgaaaatacgggacggctttttggattttgtctcgtttgtccggtcaaacggcctcccgttttatatcgtaagcgggggaatggacttttttgtgcatccgcttttggaagggatcgtagaaaaggagcggattttctgcaatcatgcatcctttgacaatgaatatattcatatagactggccgcacgcctgtgacggagactgtaccaatcaatgcggctgctgcaaaccgtcagtcatccgtaagctatccgatcagcagaaatttctcattatgatcggtgattcggtcacggatgtcgaggctgcaaagttgtccgatatgtgctttgcgagagattatcttttgactgaatgcaaagaactcggcctccggcatctgccttttcaagattttcatgaggtgaaaacaggcattgaaaacatcggggaggtgcaggcatggctgcaaaagaagaacgctggcgcgaacttgccgaggtaaaacgcgagctggctgaaagagactggttcccggcaacgagcgggaatctttccatcaaagtatccgacgggccgctgacttttctcgttacggcgagcggaaaagacaaacgaaaagaaacagacgaagattttctcttaatcgatgagtacgggaagcccgctgagaccggccattctttaaaaccttcagcggaaacgcttctccatacttacttataccaaaagacagacgccggctgctgtctgcatgtccatactgtcaataataatgtcatctcagagctttacggggatgaaaaacaaatcacttttcaggggcaggagatgattaaggcgctcggattatgggaggaaaacgcgtccgtgaccgttccgatcattgacaatccggcgcatatcccggcattggccgaaaacttcgcgcaccatgcggacgccggatcaggcgcggtgttaatccgcaatcacggcattacggcatgggggcggaccgcatttgaagcgaaaagggtgctggaagcctatgaatttttattcagctgtcacctcaagcttctgtcacttcggccgcagctggtaaaataaaaggaggaatagaaaatggcgaccatcagaattcatgacgaaaaaaatacgctcattgaacatcaggaagaagtagcgcgcttcttagacgaacaagaggtgatctatgagcagtggaacattgaaaaacttccgtctgagctttcggaaaaatacgacctaaccgaagatgaaaaagaacggattctcgcggcgtttgacacggagattcaggacatttcagcccggcgcggatatcagtctcaggatgtcatttctttatcagacaccacgccgaatcttgatgaattattaaaaaatttccaaagagaacatcaccacacggatgatgaagtccgctttatcgtcagcggacacggcatcttcgtcattcaaggcaaagacggcacatttttcgacgtccgtttaaatccgggagatttgatttcagttccggagaacatccgccactactttacgcttcaggaagaccgccgggtcgtcgcaatccgaatcttcgtgacgactgagggctgggtgccgatttacgaaaatgaaagtgtgcaaaactgatagacgcccgaacctctcatgcccccgccggcatgagaggttttttattgtaatataaagtcagctgtggctgttttttaattcttgaatatgccgcattctgtttatatcattacccgaatgggtattattctcgtattcatgctaaagattccaatatgaaatgaaaaaataagttatttagtaaaaaaatgtttacaaataaagtataatctgtaataatgctcaataacccaatcaaacttgtttcctattcttttagcggtgaggggtgaagtgaatgggcagttattctgaacaagaaaaattgcttgtatctattgataaaaaaagaaaaatgatgatagatgcagctaacaggcaagggtttacaggatatgacacgatcaggcacagccaggaactggactgtctgatgaacgcgtatcagcagctggtaaaccgtgatcgtacacatcaccaaggaatacagggccttgtgaagaaaataggcttgttctcccgaggtgacgtcatgcctgcatatgaagcaaacaaatgattgatgataaaacagataacgaagactgaatgcgcttcctgatcaagcgccgcatccgaaagatgaccgcgtacagtcagcagatttctccgctggcacggctcacgaagcgcctcgtactatctgccggctatgatgccgttcctctcgtatatcctcttacacatactctcctttaaataaaaaacaccccgatccagggtgtttttttcatcgagaagcggcagggagggtaatggtgacctctgtgcccttatcgacttcgctttgaatgtcaatcgaaccgccgtacatcagcatgattcgtttacatacgacaaggccgaggccggtgcctttttcctttgacgttacaaacggaagaaaaatgtgttcaagcatatcttcagaaatgcccattccgttgtcggccaccttaatgactgctttatgatcgcgggcttctaaatagatggacagccggccgccttcctgcatggattccagcgcgtttttcgcgacatttaaaatcacctgtttaatatggtctttcgtgcagttgaccttgagcggccgattgacgagaatcttcacattcacttccacattgtatagattcccttcagaataaataatcggcataatctcatcaagaatatcctgcagcgagttcacttccaaccgttcagcagtgggttttccaagcactaaaaactcactgacaatctgattgatccgtttaatctcctgctcaataattgagaaatacagctgatcttcctccgatttgtattttttctgcaaaagctgaatgaagccgctgatccctgtaagcgggttgcggatttcatgggcggtgctggcggcaagcgttccgatcagctccaatttctgcgcttcattttgagcgcgctccagctgggtcttgcgcttaagcaaataatattgaacgaggatgaacagaatattcagcagcacggcaatactggacatcggcagcagcacgcttttggtcagctcattcagctcaaccggtttcggataaacattgatattccaattaatatcatccagatagccgctgaccggtttcacaccttctgattgatcagcccgtccgctggcaaatatcactttattctgattggttgccttgacataaacgtcagggctcagcatattgatcatatttctcaaataatcgacttgtatggcggctactaaataatccgtgacttcccgttttgcgtctaacaccggcacgcagatcgtgaagatgcgctggcctgtaattctgctggagtagtcatttgtgatgaccgtttttttcgtctttttcgccttcgtaaaatacggtctgtcggccaaattcacctttgatttcagatcagtcgtgcttgcgatgacatcacctttggaattcagcatatacagtccgctgaatctgggttcatcctcaaaagcctgatcgagaatgtcaatgatcttttcttcattgacaggcttatcgacagcgatcgcaagtgttgtcatccgggcttttgtttcaccgattaaataattgagcttattgcggtgaaggttgagcatcatactggcttcctgtatgtgtttatcggctattttctgcttttctttttcataaatgaaaaagctgataataagtgccgggatgatcaccaatatgagataaagcttgatctttccccgggcacctttaaatgtattcactctgcatcgctccaacattacacttgaatagaggtattatatcatttttatacttctttaataagaaaaaataaccaaaatgatagaaaaacaaattattttattaaggtctgacaaaaagaagagaaattttggaaacatttttgttgacatttttcattttgtttattaatgtttctctgtaacggtttcttttgtaaaaggatgattgaatgtatgacggataaaacagaaaactcattgaaattatttattgtactgtcacgtgcgtaccgatctattaacgaccatatgaataaacatattcataagcacggcctgaacccgacggaatttgcggtgcttgagctgttgtaccacaaaggcaaccagccgcttcagcagatcggcgacaaaattttattagcgagcggaagtattacatacgttgttgacaaattagagaaaaaagaacttctcatcagaaaagcctcgccgactgacagaagagtgactttcgcacagatttccgaaaagggaatccgtcttttggacgatattttccctgatcatgctgacgaaattaaagaaatgatcagtgtgctgagtgatgaagagatagaaatgtgtacggaaatgctgaaaagagtggggttaaacgctaaacattttcatcagaaataaaaaaggaagccatttgaaaggcttccttttttatattactgattttggtcagtcgcggcgtttctaggctgtatcaatacctcgacgcgcctgtttttgctgcgcccttcagcggttttgttcgacacggccggtttatactctccgaaacctttggcgctgaatacttttgcgtcaagtttcgggttttctgtcagaatagccatgaagttgacggcccgcatgacgcttaaatgccagttagattgatattgtgagtttttaatcggtacattgtccgtatgtccgctgataataatgttcctcggcggattcagcacaaggagattcgagatttccttggcaagcggaatatcttcctgacggatatccgcccgtccggaatcaaaaaagatactgtctttaatggtaattaagagtccttctttagtcagctttgtttccagctgagtttcaagctttttattttttataaattgattgacttgcttttgcacgccttcaagttcttggcggtcggctgcttctctttctttctttttctgttctttatctttttccttgtctttttttaactgatcaacgccgtctttttcgttttcaggaggggtgacgcttgaatattcaagaacacccgtgcctccggtaaacacggcgttaaatgatttagacagcatttggaatttcgccgcatcgaccgagctcatggcgaacaatacaatgaacagagccaaaagaagggtgagcaaatccgcgtacgggatcagccaagactcatccacatgctcgtcatcatgcttcttcttcttttttctcgccattgtttgtctctccttcttgttcagcgacttttgcgcgttcattcgcaggaagatacatgagaagtttttgttcgatcactttcggggcctgtccttcaagcactgacagaacgccttcgatcatgatttcacgcagtttgacttcctgctttgatttgcgtttcagtttgttggcgaagggatgccatagtacatatcctgtgaaaatcccgagaagggtggcgacaaacgccgcactgatggcatgtccgagcgcctcggtattgttcatgttggaaagagcggcgataaggccgatgaccgcacccaaaacgccgagtgtcggcgcatatgtgccggcttgtgtaaagatggctgcgccggcctggtgtctgtcttccatcgcttcaacttcctcagtcataatatctctgataaattctgcgctttgtccgtcaaccgccatactcaggccgtttttcaaaaatgcgtcatccacgtcttcaatgcttgcttccaatgcgagcagaccttcacgtctggcgatttgcgcccattgagagaacataggaattaattgcgcaatggtcagctgtttgttttctttaaacagcactttaaaaagggcaggcacttttttgatttcttttccggggaatgcgatgatcaccgcagaaatcgtaccgaacaaaataatcagaatagctgccgggttagcgagtgcgcttaagctgacccctttcagcaccatgcccacgcttaaagcaatcaaggcgaggatgataccgataatcgatgttttatccatagttttcaccaaatcctttatactagctttctatggttaatatcggtggcagtgcatggaactttagggtgattgagaaattgttcccgaattcttcacagtttctccctttcggcatggagaaagaaacaaaaaagcggctccccgcgaggagggaaccgcttttttcttattgtgcccggactttgatgccgtcctcttccattacgacatggaaggcttttatttcgttgtcatccaataagagatctgtcatttcgtcctcgatcaattcttggatggttcttctgagcggacgtgctccgaaagctgggtggtagccaatttcagcgattttttctttcgcatcatcggtgacgttcaggctgatgccgcgctcttttaatgtgtcttcaagctctgtgagaagcaggctgacgattttcacgagatgttcttttttcagggattggaattcaatgatgctgtcaaaccggtttaaaaactccggtttgaagaacgcgctcagtgaatcaatcaacgtttgttcttccaggacgctctcttcagattggaatccgactttcacctgtttttcgccggttccagcgttgcttgtcataatcaaaacggtatctttgaagctgaccgttctgccctggctgtctgtcagacggccgtcctccataatctgcagaaacatatgctggacatcagggtgggctttttcaatctcatcgagcagcacgatgctgtacggattgcggcgcactttttccgttaattgaccggcttcatcgtgtccgacatatcccggcggtgaaccgatgatttttgatacggcgtgtttttccatgtattcactcatatcgagacggataatggaatcttttgtaccgaacagttcatctgcgagtgtctttgataactcggtttttccgactccggtcggtccgacaaagaggaaggagccgacaggtctgtttttggattttaagccggcgcggcttcgtctgaccgctttcgccacttttttcacggctttttcctgaccgatgacgcgctgatgaagatgctcttcaagttccttcattttgacttgttcatcagcctggagttttccgaccggaatgcctgttttctgttcaatgatggcttgaatatgctccgccccgatttcaggtgaagaggccggagcttcttgtgccagctgcttttccaacgccgcttcttcatcacgcagtttcgcggcaagctcataattttcttcatgaagcgcttttgttttctccgcgtcaattgctttgagtctctcagccgcatcttcttcatttacggtatcaagctccaggttcgccttagagccggcttcatctaataagtcgatcgctttatccggcaggtggcggtcctgaatgtaacgggatgaaagcgtaacacaggcgtttatcgcttcattgctgaatgtgacgccgtggtatttctcgtatttatctttaatgccttccagaatgctgatggcttgttctattgtaggctcgtgaaccatgacaggctggaagcgtctttcaagcgccgcatctttttcaatctggcggtactctttcagcgttgtcgccccgatgacctgcagctcgcctctggcgagcgccggtttcaggatgttcccggcatccattgatccctcggcagagccggcgcctacaagaaggtgaatctcatcaatgaacaagatgacatttttccgttcttttaattcgttcattaattgtttcattctttcttcaaactggcctctgatccctgtattggcgacgagagaagcgacgtcaagcaggtaaagctctttgtttttcaatttgttcggcacatcgccctcagcgattttaagcgcgaggccttctgcaatagccgttttaccgacgcccggttcaccgataagtaccggattgtttttattccggcggttcaaaatttcaattacgcgcgccacttcattatcgcggccgatcacagggtcaatcagacctgcttttgcgccgtttgtgacgttttgagcgagctcgtcgagcaggcctttttcagggccggcctgctgtttattttgattgggagagaaaccttgctcaaacgggaatccgaatgattgcggccccatgctcatagacggttttcgggttaattctgtataacatgtttcacataaaacgaattgtttttgaatggaattgacttgcatgttcaggcgaatcgtcgcctcgtttttctgacaatgttgacaacgcatttgccaaaacctcctcggaaaatgtttgatcatctttgaccaaatagattagaaaataaggtcttaactttgaccttctttgattaatagtatactctgaccttctttgactttcaagtgttttgtttcaaaccccgaaaaataaatgtttacagcatgataagtgatatttgtgaggtctgattatttttgaccaatatagtcagaaaggaaatgaaatgctttgacctttcttgatgaagagtatacgccggccctttttttctttcaatatttttgcttagaggagagagctgaatctgttttctccggggaaggacgatttgttcgtcttttcgggcgacttgtctcataagcatatataaaggcctggacaaatctgcgcttagccggagggtgaaatgggacaaacaaaaggttctgcaagtcagcttgcatttgtatacgtaggcacggttgtaggagccggttttgccacgggacgggaaatcgttgagttttttctgaagtttggctggatcggtctgttcggtatcgtggtaagcggtctgatgtttacatatttaggcgccaaaatcatgatcatttccaaacggattcatgcagcatcttatcaggaattgaacacatatttattcggcaagtccatcggccgcgccgttaatatgtttatgatgtttatattgctgggagtgacctctgtcatgctctccggagcgggagcgctgtttcatgaacagcttggctggtccgcacaagcggggatccttttgacgatcgtactgagctttgccgtcatgacaagcggcgttaaaggtgtgttcggcgtcaatatattggttgtgccgcttttaatttccttctcttttatcgtgacagcagattcatttgtatttacaagcacgagaaacgcggacgaatgggtatggcctgacaagtggaattggcttttgtccgccgtctcttacggcgcgttaaatttatcgctcgcccaagccgtgcttgtgccgcttgcgaatgaaatgtcttcagagaaggtgatcagaaggggggcttattttggcggcgttctgttgacactggtgcttgccgcgagctttttatcattatcagtgctgccggatgtgctggagtttgacattccgatggctcaagtcgtctattcgtattcgcgttcgcttcatatcatttatttgtttattattttcggggaagtgtttacgtcggtcatcggtaatttatacggattggaaaaacaattaaacagttttcttcatataaaaagtacatatatttacggcggcattttggcgtttgctttcattatcagccaaatcggctacggacagctgatttccaccgtttatccggtgtttgggtatgtgagcctcgctttcatcggcgcattgatttgcaaaaaaatcccgaaagaagaataaggatataaggaaaatgtctgtattttttgggaattccccttcttttttcctgacatttctgtataatgaattgggaaatgatggggaggagtaagagatgaaagctcgacgtgtattattgggatttatttttatttgtatcggcattgcgttttttttacagagggcgggagttattcatatatccgcaggttcggcgtggccgtttcttttcattataatgtccgcagggtttcacgccggatttatttttgcgaaaaaaacgcctgaacaggcggaactgctcgttccgggcggtatgttttttgtgctgggctgcctgttttgttttgaaacggcaacggaatggacgtattcgggcgtgacgtggcctgtttatatatgggcgcctgctctcggtctgtttgagctgtggtatttcggcgggaggaagttaggtgtattgattcctgctttcatcctgacagccgtgggagcactatgctttgctggtatgctgatgacggggctgtggccgcttttgatcatcgcagccgcgcttttgtttcacgccgttgcctttatgcagccgaaaaaaagatcgggccttcttattccgggcggcattttgcttgtgacgggcgggttgttatggtttgaaacgctgacggattggacatacgcaaatgtgacatcgcctgtctacctctttgccgttgcgttcggcctgtttgaagcctggctgttcggcagaaagcagagagggcttttgactgctgctgcggttctgtgcgccgcgggcattttcggcatattcaccaatgcaaatgaagtcatcagcgaacgcggctggcccgctctcattcttttgctgggcgccgcttttcacattccgattttcggcccgaaacctgtcaaaaacgcgggacttcttgtaccgggcggcatcttattgattacggggatcttgtttgtctttgaaacggcaaccaattggtcctactccggtgtgacatggcctgtttacctgttggcaacggcattcggtttatttgagctatggctgttcggcgggaaacagaaggcgctgctcatcccggttgcggtgctgaccttgacagcactttgctttatgatgacgaatcagccgatcattccggtttctgttttctggcctgctttatttgttctgatcgggattgcgctgatggtatttccggggaaaaaacgcggggcttaaacccgcttttgcagcctgacacagggttcaggctgtttttttattgtcacgggaaacaacattatggtatgatagcaaaagtgaaaaaagaagaaaatccgtattgatgcgggagaggttctagctacaccctctataaaaaactaaggacgagctgtatccttggatacggtttttttatgttttttagggcgccttctccgaaaaaggcgctttttttatggaatgatagataagggagagaaagacatgaaaaaagaaaaagcagttgtggtgttcagcggaggccaagacagcacgacttgtttattatgggctttgcaaaactttgaagaagtggaaaccgttacattccattataatcagcgtcaccaagaagaaatcgatgtggcaaaatcgattgccgaaaagctcggtgtcaaaaatcacttgcttgatatgtctcttttaaatcagctcgcgccgaatgcgctgacaagagatgatatcgaaattgaagcgaaggacggggaactgccgacaacctttgtgccgggacgcaaccttgtatttttatcctttgcatcgattcttgcatatcaaatcggcgcgcgccacattatcaccggtgtttgcgagactgatttcagcggctacccggactgccgtgacgagttcgtcaaatcctgcaatgtcaccgtcaacctggcgatggaaaagccgttcgtcattcatacgccgcttatgtggctgaacaaagcagaaacgtggaaacttgctgatgagctcggcgcgcttgattttgtaaagaataacacactgacttgctataacggcatcattgcggacggatgcggcgaatgcccggcatgcctgctccgcaataaaggatatgatgaatatatgaaaatgaaaggagagcggaactaattgctttctcaaatttacccgcaggttcagcatccttattcgtttgagttgaataaggacatgcacatctcagccgcgcactttattccccgcgaaagcgccggagcgtgcagcagagtccacgggcacacgtatacagtaaatattacagttgcgggggatgaactggacgattcgggctttctcgtgaatttcagcgtgctgaagaaattggtgcacggcgcttatgaccatacattgctgaatgaccatgacgagttttctgctgatgatgacagatattcactgccgacgaccgaggtcgtggccaaaacgatttacgataaggtgcagtcctacctcgaaacactggagaatcagccggtctgcgtgcagatttttgtcagggaaaccccgacaagctattgcgtataccgcccgaaaaaaggtgataggaatggctaaaggaattccggtattagaaattttcggaccgacgatacaaggggagggcatggttatcggccagaaaaccatgttcgtccgcacggcgggctgcgactactcctgcagctggtgcgactccgcttttacatgggacggctcagccaaaaaagatatccgctggatgacggcggaagacatttaccgcgagctgagagaaatcggcggagacgctttttcccatgtcaccatctcaggaggaaacccggcactgttaaagcagcttgacgcgctgattctgctgctgaaagagcacggggtgcgcgccgctttagaaacgcagggaacggtctatcaggattggttcacaatgattaacgacctgacgatttcaccgaagccgccaagttcggggatgacaaccgattttgcaaagctcgatcacattgtgtcttcgcttgatgcggcagaaaggcttaacgcggtcagcttaaaggtcgtcatttttaatgatgaagatctgcaattcgcgaaaaccgtccacaagcggtatccgaatattccgttttatcttcaggtcggaaacgataacgtccatacgacggacgaccgggcattgatcgcacatctgctcggaaaatacgaaacactcgttgataaggtttcagccgattcggatctgaatctcgtcagagtcctgcctcagctgcatacattgctttggggaaataaacggggagtttaatagaaagggagatttatatgacaagaaaagaatcagaattagaaggagttacgctcctggggaatcaagggacaaactatttatttgaatatgcgccggaggttttggaatcatttccgaataaacacgtgaaccgtgattatttcgttaaattcaactgcccggaatttacgtcgctttgcccgaaaacgggacagccggattttgcaaccatctacatcagctatattccggacgaaaaaatggtggaaagcaaatcgctgaagctgtatcttttcagcttccgcaaccacggagatttccacgaggactgcatgaacatcatcatgaatgatttgatcgaattaatggacccccgctacattgaagtatggggaaaattcacgcctagaggcggaatctcgattgacccgtatacaaactacggcagaccgggaacaaaatatgaaaaaatggccgaacatcggatgatgaatcatgatatgtacccggagacgattgataatcggtaattattccgttgtgtgatacggagtgtgaaacgaagtggagtcacactaaaagtgggaaaagtcacacctgaaaatggctctactcatgggaattgtattaaaaagtgtgacctgaggtgcaacctgaactgtaacttttatgcagtgaaaaattgatagtacagaagcagattaaggcgtacaatttgtacgtcttttcttttttatcccaaaagaaaaaatgcctatctagagatcataggcattaaatattattatcaatatcttcatttattttttgtctaagtttcgaaccttctctttaacatttgaaacagctcttttttgaatttcatcaaagttctccgcccatgccacttctgattagaacttcactttcaaaattgaatatctcatttatttctgactgttcttcatctgtgaggtgatggtattgaagttgtttagcatttacttcagcagctacatcaattctaactttagttgttctggttgtacaatttcatattcaccttctgcatactcttgttccgcataatggactccccattgacagagctcctgcaagataggtttaagtgattctccaagttcagtggatgaatattcaaccttcggcggtacttgattatacatctttctgctcacaagtccactggcttcaagctctctaagtgtttgaatcagcattttctgagttatatttgggatcatgcgctttaattcactcgttctctttggtccattcattaaaaagtataatacaagtcctttccattttccgccaatgacttcctttgtcacttcaaacccacagctaaattttttcatgtctaaagctctccattccacatttattactttttagttactatatcacaaaaaagtgggtacttccgataatgtgcttactgaaggatactatatcttgtaagttgttcttcaagtacttaaaggtactagacataaaataaaatcaattctaaaggagtgttaagtatgggtaaatttgaaggtaaaatagcgcttgtaacgggtggaacaagtgggattggtcttgctgcagcacaaaaatttgtaaacgaaggtgcatatgtttatatcacgggacgtagacaaaaagaacttgataaagctgttaaccaaattggcaagaacgtaaccggtgttcaaggtgatatttctaagcttgaagacttagacaaactatatgacatgataaagcaggaaaaaggtaagttggacattctttttgctaatgcaggcatcggcaacttccttccattaggtgaaattactgaagagcaggttgatagaacgttcgacattaacgttaaaggaaccatctttactgttcaaaaagcgttatcactattcccggacaaagtaggttctattattgtaacgggctctactgctggatcaattggcaacccagcgtttagtgtatatggagcatctaaagcagcattaagagcactagttcgcaactggattcttgacctaaaaggtactgaaatccgtgtaaatgtggtgagtccaggagttattcttacacctgcatacgatgagctttttggtgatgcacttgaaggagcgatggaaaataccagaaatactgttccagctggaaaagttgggacacctgaagaagtagcaaacgctgtatctttccttgcttcagatgaaagcagttacttgacgggtgttgaattgttcgtagatggcgggctagcacaggtataatttcactgcgcagagattacaaatagtccccaaaaaaggttaaaatcaatcgtttggtaaggtgtgaaattggtgtgacttcatgattaacgtctagagcaagtacttatgggacaagactttgacctgccttttcttccacgaggactgcatgaacatcatcatgaatgatttgatcgaattaatggacccccgctatattgaagtatgggacaaattcacacctagaggcggaatctcgattgacccgtacacaaactacggcagaccgggaacaaaatatgaaaaaatggccgaacatcggatatgaatcatgatatgtatccggagacgattgacaaccgttaattttcaggcggagtacggtctcggaatataacctaaatacccccgctttttaagtggggggtatttttcgtctgtgccgcgcagccaaaaaggtgcatgatatttgcacagaacttctataaggaaaagagagatcatttggagaaaagaaaaagacgagtaaacccggggggagcgtactcgccgcttcaatacgtgacgggtgctggatggcagctcgtctgtttcattataaaatagggaacatacgtttgtaaaggtctgcgcagttttttctcattcggagcggatcaattgtaaaggaatggtcagcatgatagcatgtcctgtaaaaagaaggagtgttcgttatggagccgttagagttaaacggtgtaaggcttaaaatgtatgattgtaaagaaagtgcgggcaaaaacggccgcatgatttcattcgtattgaaggtgacatctgaaacgtatcatgatattgccgtccttttgtatgaaaaaacatttgacatcaaggcgcccgagcgtggacttgaattccgcggtaaaataaccaactactatacatccgtcactaatctttacaataaagatgagacaggtgatttttttgtagaaatgaccgagatctgaattcatttgaaaaagctgccgggcggcagcttttgtgcgggatatgtaaatggttcggattgttcggggggtttaataggagtctctgatgattttataattcttatggttgacgacagtgagggaatctaattcaagatcacgataattatccatgatggttacatcaactatgacggaattttcatttactttttcaacaataccggttaatccgtttttaaattcaatgacgtttccaaccttagcaattttcacgagcttcctctcctttatcataaatcctgtttgaaaatattttgcagtattttctttaagaagtaaagcgatatgggtatcagcccgctcaatcattgtcccggcgggggaaagatggtatattgattttcgggaaaaagccgagaaaaggaggctgtgttcgttgctgcctgaggaaatttcagaatgtatcaaccaaatgcgcatcggtgaaatcaaagaattcagggtgcagaaagaacattttcttgcatttcgagcagttttatcgaagcaggaagattttaagcatttccgcggtattgcccagcagggcggagatgttgttttccagtatttagaacagccaagaagctgacggctcctcgcacttgaggagtctttttttgtttcttagtttctcatttcatctggctgtaacagatgtaaacaaaatgtaaaatccctccgatggatacttttactgctatttggttaatgttgtgaaaatgacggctgttttcctgccaataacaaggctgttaacgaacttcttccatcataaaagctgattgggagcactggaaaatctttaaccgtgaatttgcgcacagctcttgttaaggtagtgaagtatttaaggaggaaatcgtatgacgacaaaatttgctgccttggctgtcttttttctatgttttatgcctgcatcaaaaattgaacatacagaagctctgtttacttttgcgaagaagccaaagcaagaacccagcacactggttgctgatttaaataaaaaaagctcggttccgaagctttcaaaaacggatcataagcattctatccaaccgataaagctgtcatctcaccaagagaagaaagcagaaccggaagagacggcttatcagccgccgaaaaaaacgtattcccgcgctgacagacaacttctgtcacgtctcgttcacgcagaagcgaaaggtgaatcttataaagggaaggttgcggtagccagcgtagtgctgaaccgcactgaaaaaaacggcttcccggataccattcggggcgtgatctatcaaaggaatgcatttgaaccggtagcaaacggaagcattaatcaaaagccggataaggattccatcgccgccgcaaatgaggcgcttgaccatccgggcagagaaacggacgcgttgtttttctacaatccgaaaacggcatctgaccactggatccgttcccgaaaaattatcgaacggatcggcagacacgtatttgcgatgtaagcatagcgggatcaaaaatatcccggctatgcttttttcaattttgagaaatcgaaaatattttcagaacttgtctcatatgatgatggaagaacgagagacaaggagagacaccatgaatcgatttgtgaaagggatcattcttttatccatcgccgcctttttcgcggaatgtctggaatttgtcgtgaatatgatactggcgcgggagcttggcgagcatgggatgggactttacatgagtattctgcccaccatttttttaatcatcgtcatcgccagtctggagcttccgatctccatttcaaaattcatcgcggaatccaatcagaagctgcatgaaagcatgctccggcatgccttcagaatgaccgccgtttttaccgcgttttcaaccgcggccgcaagcatcgcgctgccgttcattcctgtattcgatacgtatcacccgtttattaaagggattgtcatcgggctgattccagtcgtcgcttttacatccatcgccagaggttattttatgggtgtgcagcaaatgggaaaaatcgcggttgcgaatgtcatgaaaaaaatcattcaagtgctttgtctgtttatcttttttcaatggtattcttttgaaattgatatggccgtgctcatttcattatttgtgctggtcgcaagcgatgtcgtggtgttcgtttacttgtatacgcagtttattttggcgcggagggcgctttccggccatcagcacattcatcttcgcgggaaagacgtgcggaaacgcctcctggccgtatccatcccgacaacgggacttcgtatatttcatgcggtgacaaacgccattgaaccctttttagtgaaaggagcgctgctggcgtccggggcagccgggacagccgcgattgatcaatacggcatgcttgccggtgtagcgatgacaatcggttcgtttcccgcgtttatcgcccattcgctgatggtcgtcatgattcccagcatttcagaagcgtatgcgctgtcccaatatgatattgtgctgaaacggctgagacaagcgatttttattacattcggctacggcattccggcagtctgggtcatgtttcagttcgcgggcccgctgacccatttgttttttcagtctccggaagcgcagtattatttgcagcttttgtggccgttttttctttttcatctgtttgtgatgccgcttcaggcctgtctgatcggtatcggccacgtgaaaacggcgttttatcataacgtatggagcagcattgtagggctttcgatgatgtatgtgctcggttctatgccggaattgcaaatgctcggcattatactcggcatgaataccggcatgattcttctgacaagtttacattacgcgacgatctgcaaagacctcggtgtctccgtgtttttgacgggcggcggaagaacagcgccccggatcgaaagctgaaaaggctgatacatttcaataaggaagggcaagctatccgaaacgcgtgaaaggaagatcatatgcataaaaaccgcctaattgtatgtgcagtccttttgatagctgccgccgtctggatgcctgaagcaaaagcctcatcagaaaaacaggcagttcccgccgtgtttctgatgaagacgattgaaggagacgagatatcgattccgaataaagggcagaaaacgatattgcatttttggacatcgtggtgtccgccgtgcaaaaaagaactgccgcagttccaaacgtattttgaacagcatcagtccgatgatgtaagccttgtaacggtaaatttgatgaatgccgagcgaaacaaaaataccgttcaaaactttgtcagtcagcaccatctcactttcccgattgttcttgacacgaaaggcgagcttatgaaggaatacgatgtcatgacgattcccacgtcatttctgctgaatgaaaaaggagaaatcgaaaaaaagatcgtcggtccgatgaccgcctcacaattaaaagaatggtcagagaaataaaaaggtgcgggaggaattcctcccgcaccttttttgcatataatgaacagctgaagaaacactaatgataattattatcaaaaagaaattaaaacaattataattgaaatcttccgccggcatgctataataaagaaaacactgcgataacactgtgaaaatgctgcctgtcaggcggctgttttgcttttatcggggaattgaagatgatttgcgttctcaattagagaggagaattcataatgaatgaacaagtgatgacacaaacccattcacaacagcacatacaagaagagcgggccggaaaaaagtggctccagcatgcagaactcattgcggcgctcgtatccggcgtccttattcttgcggcctggttttttaccgaaacaaaaggcctgtccgtcactttgtatatccttgccttcctgatcgggggatttgcaaaagcgaaagagggaattgaggataccattgagacgaaggcgttaaatgtggaactgctgatgatttttgcggctgtcggctccgccctgatcggttattgggctgaaggtgctgttcttatctttattttttcgttaagcggcgcgctcgaaacatatacgatgaataaaagcagccgtgatttaacatctttaatgaaactggaaccggaggaagcgaccctgcttgcggacggacgggaaaagcgggtgccggctgctgaacttaagatcggtgacataatcgtcattaagccgggcgaacgcgtagcagcagacgggatcattgagtctggcgtgacgagcctcgatgaatcggcgcttacgggtgaagcgatgccggcggaaaaaacagccggtgattctgtgtttacaggaacggtaaacggaaacggctccttaacggttcgtgtgacgaaaacaaatgaacagtctttattcagaaaaatcattcggctggtggaatcagcccaaaacagcgtgtcaccggctcaggcatttattgaacgattcgaaagtgtctatgtcaaaggcgtgctgttagccgtggctttgcttttattcattcctcatttcgctttaggctggagctggagtgaaaccttttaccgggcgatggtgtttatggtggtcgcctccccgtgcgcgcttgtcgcttctattatgcccgctgcgctttcccttatctcaaatggtgcccgcaacggattattggttaaaggaagtgtgtttttagagcagctgggaagcgtacggatgatcgcatttgacaaaaccggcacggtcacaaagggacagccggcagtcgcggcatttcaagctgcggaacatgtgagtgaagatgagatcatgcaggcggtgtatgcaatggaaaagcaatcaagccaccctcttgcaaaagcgatagctgaatttgccgaaagccggggcaccgcgcccgcaggacatctatcgattgacgagacgtccggattcggtgttcaggctgaaatagaaggcgtcaaatggatggtcggaaaagcggggtttgcaggtgaagatgcggcagatgcttttttgcaaacatcgggaaaagaattaaaggataaaggttttacactggtctttgttaaaaaagatgaccggattgcgggctgctttgccttaaaggatcaaatccgacctgaagccaaagccgtgatggctgagcttgaatcactgggcattaaaacagccatgctcaccggcgatcagtctgaaactgcggctgccattgcaaaagaggcgggcatgacgacggttgttgccgattgtctgccggaccaaaaggcaaaagaagtgaagaagctgaaagaaacgtacggcacaatcgccatggtgggggacggcattaatgacgcgcccgctctgaaaaccgctgacgtcggtattgcgatgggcgggggaacggacgtggcccttgaaacggctgacttagtccttatgaaaaatgatcttcacaagcttgtgaaaatgtgcagactctcaaggaaaatgaaccggattattaagcagaatattgttttctcgctctcggtcatctgccttttgatctgcgctaactttctgcaggtgatggaactgccgtttggcgtgatcgggcatgaggggagcacgatcctggtcattctgaacggactgagattattaaaataaacatgacagccgcacatcgggcggctgtttttttaatgttcgttcacagcataaacgccggaaaactgatagaatgaataaagagtcactttggtaaggaggaaaagcaaaaaatgaacagattagaacgtgtttcatcttggctgaaaaaagaaggacatgatgcggcgtttatacatactaaggaaaacgtattttatttaactgatttttacacggatccgcatgagcggttaatgggattgttcctgtttcaggaacaggagccgtttttcgtttgtccgggaatggaagccggacaagcccgcagcgccgggtgggagcatgatattatcggctacggcgatcacgaagatccgtgggagctgatcaaagccgagctcacaaaacgaaatgtgcggcttgattccatcgcggttgaaaaggattcgatctctctttcccgctcagaacagctcaaacaagcttcagggggcgcggcatttgtttcggcagaagaaacgctcaaccaattccgtctcgtgaaagatgagaaggaaatcagcattctcagggaagcggcaaaactcgcggattacggagttgaagtcggtgtcgcggcgcttaaagagggtgtgagtgaaaccgaagtactcgcgcagattgagtttgagctgaagaaaaaaggcgtgcagggcatgtcattttcaacgatggtgctgttcggggaaaaatcaggccagccccatgggaatccgggtgcagaccggttgaaaaaaggcgatttcgttctgtttgatctgggcgttattcttgacggctactgttcagacattacgagaacattcgcataccaatcaatcagcccgaaacaggaagagatttacgaaacggtgcttaaagctgaacaggcggcgcttcaattaagcaaaccaggcgtcagaatcggcgatctcgatttaaaagcccgcggcattattgaaaaagccggatacggagactatttcccgcaccgcctcggccacggactcgggatttcggttcacgaatatccatcaatgagcagcgcgaacgacacactcctcaaagaaggcatggtatacacgatagaaccggggatttacgtgccggatgtcggcggcgtgcgcattgaagacgatgtgttcgtcacaaaagacggcgccgaagcattaacgcagtatccgaaagaattaacgattctgaaataaaaagctttgtgataaaaaaggacggttctggaacgcagcgtccttttttatcaccttttaaatgaaaaaatcatcaaaatgctgaaatggtttgatgtcatgcttttcattcaggggccgcagggcaaggtaactgccgccgactatggccagacacaaaccgattaagcaaagaatccccatcgctgttcttctcctttcaaacgaataggatgtatctgtttctagcttactgtatgaaacgcattccagatcaagggaaaaaaagaaaggggggacgccatggctacgatcagagacattgccggcgctgccggggtttccgttacaacggtatcaagagtattaaacgatcatccttatgtaagtaaggacaaaagagaaagagtgaaaaaagcgatgcaatcgctcggatatacgcgcaacattcatgctgtacatttatccaaaggtttttccgatatgatcggcgttgtgcttccgtcggtgaatctgccgtattttgcagaccttgttgcaggtattgccgaggctgccgaagcgtcaggcgtgcatctttctttataccagacagattatcagcagcaaaaagaacgttttgccttatcacaattacaggagcgccaagtggacggcctgattatctgctccaaagcaattcctgatgaacatctgcttaccgtgaaagaaccgctcatcctctgccagtacactgatgcggcggggctttcctccatcagtaatccgcatcgggaagcatttcggcacggtctggattatctgatagaaaagggacaccggaaaatagcgatcagcctggccagaaaaaagggaaaaaacagtcaagtacgcattgccgcatacaaagaggcgctcaagaagatcgggcagccttacagggaagagctggttgtggaaaaggcgctgacgctgcttgacgggaaagccctttttcatagatggaagagctgggatgacaaaccgactgcgctgtttgcggcgaatgatcaagtatccgcaggtctttaccttgaagccaaggcaaatgggacgcgcatcccggaagagcttgcgattttgagcatcgacaatcatgatatcagcaagatgttagggatttccacaatagatatacaaacaaaagaaatgggaaagcaggcttttcacatgcttgagaaccggatcggcggcgggcctccggcaaggaaagttcttgattaccgccttattgaacgatcaaccgtctaaaaaaagaattgacgcgctttccgttcgttttgtacgatatgaggtattgaatgacaaaggagctgaggatcatgaaggggtcctttacagttgaaaaggtattaaataacaatgtgctcatcgcaacacatgatagatacagtgaggtcgtcttaatcggaaaagggatcggctttggaaaaaaacaagcggatgtcattgaagataaagggtatgacaagatgttcatcttaaaggatgaaaaagaacaaaaacaatttaaaaagctcctcggttatgtggacgagacacttgtcgacatctccaatgacgtcatttatcatatcaagaagcggacaagccaaccgttaaatgagcatatccatattgcgctgactgaccatatcgcctttgcggtaaagcggctgcagcagggttttgacattaaaaacccgtttctcatggaaaccgaaacgctttatccggaagaattccaaattgcccgtgaagtcgtcggcatgattaatgaaaagacgggaatctgccttccggaaggggagatcggctttatcgctctgcatatccactccgccctgacgaatcggcccctttcagaggtcaatcagcattcacagctgatgtcccggctcgttcaggtgattgaggaatctttccagatgaaagtgaataaagaaagcgtccactatttgcggctgatccggcatatcagatttaccatagacaggattaatcgggaagagcagacaaaagaaccagaaaagttaatgttattattgaaaaatgaatacccgctatgctacaatactgcttggaaactgataaaaatcttgcagcaaatactgaaaaaaccagttcatgaggcggaagcggtttatctcacgcttcatttgtaccgattaaccaataaaatttcataatttcagttgaaaccttaaaaacgtgtcactgattcgatcaggcatgagtgattgagggtaaaaaacgggaagaacggtcccgttattttgcacaccctttttactcatgccttttttgttgtgtaaaagggcaaatgtaaacggttaaactgaagacttgcgccagtgaattcgttgtcatgaattttcgctgtaaggtcacactagctaacagaggaggtacatcttttatgtttaaagcattattcggcgttctccagaaaatcggccgtgctcttatgcttccggttgcgattttaccggctgcggggatcttgcttgcgttagggaatgccatgcagaacaaagatatgattcaagtcatgcacttcttaagcaatgataacgttcagcttgtggcgaatgtcatggaaagcgccggccaaatcgtatttgacaacctgccgcttctttttgcagtaggggttgcgatcggtcttgccaacggagacggtgttgccggaatcgcggctattatcggatacttggtcatgaacgtatccatgagcgccgtgcttatggcaaacggcagtattccgtctgacaaaattgaacgggcaaagttttttgcggaaaaccatccggcctatattaacatgctggggatacccactttggcgacgggcgtgttcggcggtattatcgtcggggttctggccgcgttattgtttaacaagttttataaaattgaacttccgcagtacctgggattctttgcgggtaagcggttcgtcccgattatcacatcgatttccgcattaattctcggtcttattatgttagtgatctggcctccgatccagcacggtctgaattccttctccacgggtcttgtggaagcgaatccaaccttggcggcctttattttcgggatgattgagcggtcattgattccgttcggtcttcatcacattttctactcgccgttctggtatgaatttttcagctataaagatgcggccggagacatcatccgcggagatcagcggattttcatggctcagatcaaagacggcgtacagctgacggcgggaacatttatgacggggaaatatccgtttatgatgttcggtcttccggcggcagcgcttgcaatctatcatgaagcgaagcctgaaaagaaaaaacttgtagccggaatcatgggttctgccgctctgacaagtttcttaacgggaattaccgagccgcttgaattctcattcttgtttgtggctcctatcctgtttgcgattcactgcgtattcgcgggactttcctttatggtcatgcagctgctgcatgtaaaaatcggtatgaccttttcaggcggtctgattgactacttcctgttcggaattctgcctaaccggacggcttggtggcttgtcattccggtcggcttaggattagccgtcatttactacttcggtttccggtttgcgatcagaaagttcaatctgaaaacgccgggccgtgaagaagaggctgcggatgaaggtgcgggcgcctcaggcgaagccggcgaccttccttatgaaatcctgcaggcaatgggtgatcaggaaaacattaagcaccttgacgcttgtatcacgagactccgcgttacggtcaacgaccagaagaaagtggataagactcgtctgaaacagcttggcgcctcaggcgttcttgaagtcggaaacaacattcaggccattttcggcccgcgttctgacggtttaaaaacacagatgcaggatattatcgccggacgcacgccgcgccctgaaccgaaagtatccgcacaagaagaagtcagccagcaggttgaagaggttatcgcagatccgctccgaaacgagcagggtgaagaagtgttcgcttctccgatcaccggcgaaatccatccgattaccgatgtgcctgatcaggtgttctcaggaaaaatgatgggtgacggttttgcgattcttcctgaagaaggaatcgtcgtatcgcctgtccgcggaaaagtgctgaatgttttcccgacaaaacatgcgatcggccttcagtctgacggcggaagagagatcctcattcatttcggaatcgacacagtcagcctgaaaggcgaaggattcacttcttttgtttctgagggtgaccgggttgaaccgggacaaaagctgcttgaagttgatcttgaagcggttaaacctcatgttccttcattaatgacaccgattgtctttacaaatcttgccgagggtgaagcgatttccctttcggccgaaggtaccgtaaaacgggaacaaaaagatattgtgaaaatcggaaaataagcatataaatacgccgtgcttgtcagatgacaagtacggctgtatgatataatattgtgtagtaaaatagctttaatttaaaggagaatgataatcatggcacaaaaaacatttaaagtaacagcagattccggaatccacgctcgtcctgcgacagttcttgtacagactgcaagcaaatacgatgctgacgtaaacttagaatataacggcaaaacagtaaaccttaagtcaatcatgggcgttatgtctctaggtatcgctaaaggcgctgaaatcacaatttccgcttcaggcgctgacgaaaacgatgctcttaacgctttagaagaaacaatgaaaagcgaaggactcggcgagtaatgcaagaattaaaaggaataggcgcttcagccggaattgcgattgcgaaagcataccggcttgaagagccggacttaacggttgaaaagaaaaacattgctgatgctgcggctgaagtaagccgttttgatgaagcgattgtacgttctaaagaagagcttgaaaaaattaaagagcatgctttaaaagaactgggacaagacaaagctgacattttctccgcgcaccttttagttctgagtgatcctgagctgttgaacccggtaaaggagaaaatcagcacagattcagtcaatgctgaattcgctttgaaagaaacagcttccatgttcgttactatgtttgaatcaatggataacgaatacatgaaagagcgtgcggcggatatccgtgacgtaacaaaacgtgtgacggggcacctgctgggcgtggaaattccgaacccgagcatgatctcagaagaggttgttatcgtggctgaagatttgacaccgtctgatacggcgcaattaaaccgccagtttgtaaaaggttttacaactgatatcggcggacgcacttcacactccgcgatcatggcccgttcgcttgaaattccggctgttgtcggcacaaaagcggctacagggacaattgaaaacggtgttacggtaatcgtagacggcatcgatggtgatgtgatcatcgatccttccagtgaaacgttaaagaaatatgaagaaaagcacagtgcttacctggcgcaaaaagctgagtgggcgaagctcgtcaatgaaccgactgtttctaaagacggccatcatgtagagcttgccgcaaatatcggcacacctgacgatgtaaaaggcgttcttgaaaacggaggagaagctgtagggctttaccgtacggaattcctttacatgggacgcgaccagcttccgacggaagacgagcagtttgacgcttataaaacggttcttgagcgtatggaaggaaaatcagttgtcgtgcggacattggatatcggcggcgacaaagagcttccttacctgcagctacctaaagaaatgaacccgttcttaggctacagagccatccgcctttgccttgaagagcaagaaatcttcagaactcagcttcgtgcgctgcttcgtgcaagtacatacggaaacttaaaaatcatgttcccgatgattgcgacagtaaacgagtttaaacaggcgaaagcgattcttctcgaagaaaaagaaaaactcgtcgaagccggcgtagcggtttctgacgatattgaagtcggtatgatggtagagattccgtctacagccgttatcgcagatcagtttgccgcagaagttgacttcttcagtatcggaacaaatgacttgatccaatacacgatggctgctgaccgcatgaacgagcgcgtggcttatctgtatcagccatacaatccggcgattctccgtctgatcacccttgttattgaagccgctcacaaagagggcaaatgggtcggcatgtgcggagaaatggcgggagacgaaattgcgattccgattcttctcggcttaggcttagatgagttctcgatgagcgctacatccatccttccggcaagaacgcagatcagcaagctttctaaaaaagaagctgaatcattcaaagaaacaatcttgtctatgagcacgacagaagaggttgtcgcattcgttaaagaaacattcaataagtaatacaacagccagacggtgtaagccgtctggtttttttcatattcggaaaaaaggggggaacaataactttcaacaggagggattatcatgacaaaatcatttgcagcgggggatacggtctatgtgatttaccgcaatccgcatgccgccaatgtcgcccatattaaagaggcggagatcgtccatcacccgtatcatgagggagaattgtctctgtttttatacgaaacctatcatccgctggccgaagatgacgcggtcttttcgacatatgaggaagcggaagcgctttacagcgagctttttgaagaagaccggtatcattgatcaaaggaaatgtttacaacgcatattcactctcttttaaacggaaagtaacaacatgagaatatgtaaagggagtgtctgtctatgctgaagccgtttgtgccccagcttgtttatattgaaccgagagcgctcgaatacccgttaggacaagagctgaagaataagtttgaaaacatggggcttgagatcagagaaacgacatcgcataatcaagtccggaatattccgggaaaaaatcacttgcagcaataccggaacgcgaaatcaacattggtaatcggcgtccggaaaacactgaaattcgattcttcaaagccgtccgccgaatatgccattccatttgcgacgggctgtatggggcattgccactattgctacctgcagacgacgatggggtcaaagccctacatccggacatatgtcaatgtggaagagattctggatcaggctgatgagtatatgaaagaacgggcgccggaatttacaagatttgaagcctcttgtacgtctgatatcgtcggaatcgatcatctgacacatacattaaaaagagccattgaacatttcggacaaagcgaattgggacagctcagattcgtgactaaatttcaccacgtcgatcatttgcttgatgcaaagcataacggaaagactaggttcagattcagcatcaatgcggattatgtcattaaaaactttgaaccgggaacttctccgctcgacaaacggatagaagccgccgtcaaagtcgctaaagcgggctatccgctcggtttcatcgtggcgccgatttatattcacgatggctgggaggaaggctataaggaactgtttgagaaacttgatgcggcgcttgatgaagacgttcggcatgacatcacatttgaactgatccagcaccgttttacaaaaccggccaaacgggtgattgagaagaactatccgaaaacaaagcttgagcttgatgaagaaaagcgcagatacaaatggggacgctacggaatcggcaagtatatataccaaaaggacgaagagcatgacttaagggaaacactcgaatcttatatcgaaacctattttccgaaagcgaaaatcgaatattttacgtaaggcggagctgtcggtacgacggctctttttttgctgcgccaaatggcggaaatttttgatatttatttcaagatttattcattttcatgaccgaaagaccgatataactctcaggaggggatggttatgtttaaaaaaatgcatatcaaaattgctgtgtttgtatcggcaatgcttatcgtaacggttgtttttttaacggtttcttcatatttgacattaaagccgatgatgacggatgaagcaaaacgtacgacagagaatgtcaccaattcactcggtcagaacattgagcttcagctgaaaaatgatgagaccgtattattgagattagcaggcggtgaattgtcccggtcttttctatcagatgggaacaaagaaaccgcgcggctttttaacgatgagttaaaacagatcggacagaatgacaaatatgtcgcgcttgcgtacgtcggaaccgcaaacaaacaaatgtttacatatccaaaggccgactttgccaaagactatgatccgacaaatagaacgtggtataagatggcggctgaaaaacccgataaggttgtctggactgacccttataaagatgcagtgacgggagacatgatcgtgacggcgtcaaaagccattcaaaacagcggaaccgtcgtcggagtggcgagcttagatctgaaactgtcctccattcagagcatggtcaacgagcaaaaggtaccgtataaaggatttgcgtttttggcggatgaaaacggctctcttctggcgcatccggaaaaacagggaaaaaatatttcggaagaccagacgttaaaagacatcaccacggataaagaaggcatcaaagagctgcaggggaacatggtcgtctaccaaacggtaaaagaaacagggtggaaagtcggaacgcagtttgaaaaaaatcagctgatgggagtagccgacaaaatgaacacggtgagcatttttatgtcactgatcgcccttgtgattacaatcggactcagctatttcctagcaaaaacgataaccgggccgattcagcagctgatcgcgaaaacaaattcagtctcagcgggagatttaaccgtccgcgctcagacgaaatcaaaagatgaagtaggcgagttaacaaaagactttaaccaaatggttgaaaatatgaaagagatggtcgaacaggtcaaggcctcctcagaaaacgtgtccgatacatctgaccagctaaccgtcatctcacaggagacaaatgaaacgagcggacaaatcgcaaaagcgatagaggaagtcgccgccggagcgacagagcaagcgtcagaggttgagacgatcaatgaaaaatcagaaaatctctcagtcaaaataaaaggaatcgcagatcgcgcgggcagcataaaacaactctcaaaatcttcagaggatgccagctacaaagggctggacgcgctcggacagctgctgatgaagtcaaacgaagccaattcagaaacgaaaaaagtagaggcaatgctgaatgacctggaagaacaaacgaaaaacatagaagaagtcgtgacggcaatatccgccatttcagaccagacgaacctcttggcgctgaatgcgagcattgaagccgcaagagcgggagaaagcggccggggctttgccgtcgtcgcggaagaagtccgcaagcttgctgaacaatcagctctttcttccggccatatcagtgagacggtccggctgattcaatcagagacaaaagaagcgtcacacgcgatgattgaggcaagcagaatgaatgatgaacaaaacagcgccattcatgaaacgggtgaggtcctcaatctgattacgacggaaatgcagtctcttgttcaaggtatagatcatatttacaatgacattcaaaaaatgagtgaagaacaagccgcgattcaagaagcgattcaaagcatctccgccatttctcaagaatctgcggcagcggcggaagaagtgaatgcttctactgatgaacagctcgttacgcttgaaaaagtgaagcaatcgactgacatgttaaagagcgcgagcgaagatctcatcagcgccatttctaaattcaccttgtaacgcggtctctatcagcctataatatggtaatatagacatgaaagagtgatatatgaatcgcatcaagggaggaaagcgcagtgaacaaaacggttggatttatcggtttgggcgtcatgggaaacagtatggcatcgcacattttagaagcgggctatcctgttttagtctacacgcgtacgaaacaaaaagcggaagagattctgaataagggagcggtctggcaggagacggtcaaagacctttcagagaaagctgacattattattaccatggtcggctatccgagtgatgtcgaggaaatctatctcggcgaaaatggcattctccggcacgcaaaagaagggacgtttgtcattgatatgacgacatcaaaaccgtctctggcgaagaagatagcggagaaagccaaagaaaaatccattcacgccttggatgcacctgtttccggtggagacatcggcgcgaggaacggaacgcttgccattatggccggaggagaaaaagaagcgtttgaagcatgcctgccgcttttctccgttatgggggaaaacattcagtatcaagggccggctggcagcggccagcatacgaaaatgtgcaatcagatcgcgattgcagcgggaatggtcggagtggctgaagcgatggcttacgctgaaaaatccggtctgaacccggaacaagtgctgaaaagcattacaaccggagctgccggaagctggtcattgtccaacctcgctccccgtatgctgaaaggcgattttgcaccaggattctacgtgaaacactttattaaagacatgggaatcgcccttgaagaagcggagctgatgggagaagaaatgcccggattggcgctggccaaatcattatacgacaagctttccgcgcaaggggaagaaaacagcggaactcaaagtatttataagctttgggtgaaataaaaaaagattgcccgaacgcgactattttatggatgttgaggaagcgaatacttacggtattgttggtagtgttttataaacaatgatctgcaaatcttgtattcttagggccttaatgaagacaggaacttggcaggataatgtattaatgtgtatccgtttataatattctactgtttggaatccccctcgtttgtttgatgcagactgtctattataaatcaaaagggggatttccgaataatgattaggattaatacaactttccaaaagtaggatgtatcatgtttgattcaaactatgaattcgagtaacccaaatgtacatagcaataaatcgagttcgtattcccgcaattaaaacctagtaatttggcatccgaaattgaaattctatagattagccttctagccaaaactgaaaaataaaagaggatgtatcgtaaaaaattcaagagatttacgaaaacatcctcgattcaaagatttcatcattacatgctgttttttgaattccagatgaaatcaacgttaaacccatttgttaataatatgaattttaatgttgtacagtaatatagtgtttcagttctcctctatgggtttgatttccccaagtcaatgctaccaccacatcatacttgcctgctggaatattttttgtcaaaaagctcactttaaaactgcgaatattacggccattaacatatatgtctttgactacatctctttttttattgacaagaagaacattaacaccccagtttacctcatattttgtaggcacagtacctgttacgacaatagaagtagcgtgttttgagtaagtattagcatctgtttggaatttaattgctccttttgaagtcatggctaacgcttctgaactgtttgagaaaatcccgaatgtcaaaagagcaactgtgaatagtgtcattacaatttttttcaattgaaacttcctttctccatttatttagaaatccattcaatatattactaaattttaaaaaaatattcaacagaaaaataggtaaattctactttttattaaatgaagtattactaaagaagcaaaggctaacaaaaccaatttaatcatcacgtttaagattttacaaaaaagctcccagcacttatgtgccgggagcttaaaatgtttataaatttataaagtgtcaggcccttcttcgcccgtacggatgctgattgtattgggaacttcgtaaattaaattttgccgtcaccgggctcacgggttttgagcactttttgcaccgtttcagccacttttttgtttattttccgataaattgctgtgtccagatgtttcctgattctacataaccgacaccgatttgagtgaactcggggttcaagatgttctttctgtggccttcactgttcatccaagctttaacgacagcttcaggagtcggctggcctttggcgatattttcaccggcagttttataagtgattccgaaagacttcatcatatcgaaaggtgaaccgtaagtaggactttggtgatcaaaatagtttttgtctttcatatcttgtgattttgcatgagctgatttgcttagtttatcatcaatctgcagaggttttaagccttgcttttgtctctctgcgtttgtcaattcaacgactttcttttcatacgcactgacagatgaaggagttttctcgctgctgttgtttgtgttatctgtctgttttgcattgtcagccgtctggttttgatcggctttcggtttttcagcagctgccggtgccgtttttgccggtgtttctttttgaacgtctttaactgtcatatcagaattctttgcgtgtttttgcagctgctgtttcagttctttctcatttttaaagctcagctgtttcgcgctctttttcatatgtagtttttcaacagcctcttgaagagtcagatgctgtacagtgtttccttttttcacggtaacgacgtgctggcatgacagctctttggcagatgcctgctgaatgcctccgaatgtaatcaaactgactgccgcggcagcagataagagaaatgcttttttcataagtttatagcctcccagagaagttgtttttttctacatgaaaaatcttatcacagcttttttgtcataatgcaggcagccatttcctttgacaacaaactcttgtcataattgtaattgagcgcagaaaaatggctctataccgggaaaaacgatctgtatttattttttaaaatccgttacatctcttcaaattatttgaagtgttagatatattttaagataatttgatcttgacagttttttttacccgttttcgctgtaacaacttttacaaaaatgttacaattaaaatctgtttatgtaaatatattcaatgatttgagaggtgtaacagaaagtggctgaagttgcgcgtgaaccaaagaaaaaaacgaaacgttacagagcgctgagaatgaatctctattttttagttgttttccttctctttacggcactgatttttaaactcggcatcgtccagattgtcgaaggggataaacaccgccaggatgcggagaaggcaaatgcaaaaaccgcctattatccgacaccgcggggaaagatgtatgacaagcggaacagagtggcggttgataaccaggctgtgcctgaaattgtatacgtttctacctcaaaaacctcggcaaaggacaaattgaaaacggcaaaaaatctcgccgcactgattcatattgatactgaatttatgaaggatcgaaatatcattgattactggcttgccgcacatccgaagaaggcggaaaagcttatgaaggattcagaaaacagcctgaaatcccaagaagtatacaaacgccagattgaacgcgtcccgaagcaggagattgacgcgatcaaacaaaataaaaaagagctggaaatcgcggcgatttatacgcgtttttcaagcggcaacgcctatcagccgcaagtcgtcaaatcaatggacccgaataagctgaacggaaacggaaacagcggttcactgcttgacgagcatgaaaacaacaagcaaaaaccaaaaagcgacctgacatatgaagaagtttccgtggtatccgagcacctgaaagagctccccggcattgacgtgatcaatgactggacgcggaaatatccatacgacaaaacgctgtactctctgttcggcggtgtgacgacaccggaacagggattgttgggcgaacggaaagattattatgtcacaagaggctactcactgaatgaccgggtgggtaaaagctacattgaatatcagtatgaagactatttaaacgcacataaagaaaaagtagagtatgtggaaaacagcaaaggtgaagtcgtcagccaaaagcccgtcgatgaaggcagcagaggctacgatctgcagctctcgctcgatatggaattacagtcgaaagtcgaaaaagtcattgaaaaagagctgagaagaagccgcgccgcaggcaactttatggttgacagaggatttgccgtcatgatggatccgaacaacggggatattctctcaatggcggggaaacgcatcgatctcgaaacaaataaaacacaggattttgcgatcggagcatttacgacccaatatgagatgggctcttctgttaaaggagcgactgttctcgcgggttaccaaagcggcctcccgcattataaaacgtttgtcgatgcaccgcttgtatttaaaggcaaaacgagaaaacaatcgtggacacaaatgggagccattactgagctgaccgcgctgcaaagaagttcaaacgtgtatatgtttcatgtggccatgcatatcgcgggcattacctacgttccgcacggcacgctgccggccggattagacgatattaaaaaaatgcgcaactattacgcccaatttggcttgggtgtgaagaccgggattgatcttccgcaggaatcagcgggcatgcagtcaaatccgcaaatggtcgggggattgctgcttgactttgcgatcggacagtttgatacgtatacgccgcttcaaatggctcaatatatttcagccatcgcaaacggcgggtatcgcgtccagccgcggatcgtcacaagcattcatgaaccggacagcaaaaacaagattggaaaagcgattgaacagcgagatattaaaattttgaacaaagtaaataacagcccaagcgattttgaccaagttcataaaggaatgaagttggtcacaagctcacctcaaggaacggcttattcaacattccagggttccggcgctgatgtttccggaaaaacgggaaccgcgcagacgcgctattacggcacgaacaaaaactggtgggggaaagagacgtataacctgacctttgtcggttactatccgtcagaacatccacgagtggcattcagcgtcgtcgtaccgactgttcaggatgatcacgatcatgtcagcaaaaacattgccaaaggagcagttgacgcttacaaagagcttgaaaagaaatacaataaaaaataacaaatgaaagggcggccgaacatctcgtgcgccctttctttcattcaggaaaattgacgttcacaataagaatagaaggagaatgctcattttttagcgaatcaatctagtggaatttctttttataccagtccgtgtccagcctgcagtgcgagtataatgcaaaggagggattctgtggaacaggatactcagcatgtcaaacagtttcaatcgaaaaccgatcttcatgccgttttgacgtctaacgggcgtattatgtatatttctgcaaactgcaaatcgtacttcagttattctcaggaagaaatgatcggctcatttctcaaaacgttcctgcatgaagaagatcaatttttggttgaaagttacttctataatgagcatcatttgatgccttgcacctttcgccttattaaaaaagatcataccatcgtatggcttgaagcgggtgtggaaattgtcacaccgcaaatggaggggacggatcgggaaatcatcctcaaaatcaaggtgcttgaggagaagacgccccgccggccttatatgtatgaacaaaagaagcaaaaggcagaacaacagtcggaagatgcggctggaaacggcgaattcgagcgtcttgtcgaaatgctgccgaatcctttatatgtcagcatcaacggcacaatcgcctacgccaacaacgcgatgcttgccatgctgggagccgaaagcaaagacgaggtaatcggcaggcgctcttatgagtttattgaagaagagtatcacgacattgtgaaaaaccgaattgtgcggatgcaaaaaggaatggaagtcggaatgatcgaacagacgtggagaaggctcgacggcacgcccgttcatttagaagtaaaggcggcaccgacgacatataaaaatcagcgggcggaattgctgcttctgattgatatttcttcacggaaaaaattccaaacgattctgcaaaaaagcagagagcgttatcagctcctcattcagaattcaattgatacgatcgccgtgattcacaatgataaatgggtattcatgaatgagtcgggcatttcgctgtttgaggctgaaacatatgaagatttaatcgggaaaaacgtctatgatcagcttcatccctgtgatcatgacggcgtgaaacagcggatccaaaatattatcgaccgaaagaccgagtcagaaattattaagcagtcgtggtttacctttaaaaaccggctgatctacacggaaatggtctgcattccgacgacgtttttcggagaaacggccgtgcaggtcattctgcgtgatatttctgagcggaagcagacggaggaattaatgctgaagtcggaaaagctgtctatcgcagggcagctggcggcgggaatcgcccatgaaatccgcaatccgctgacggcgatcaaaggatttttacagctcatgaagccgacgatgggggaaaacgaacattactttgaaattgtgttttctgaactgagcagaatcgaattgattttaagtgagcttttaatgcttgccaaacctcagcaaaacgccgtgaaagagcgtgtaaacttaaagaagattataagtgaagtgaccgctcttttagagacgcaggcgaatcttaaagggatttttatcaaaacggattacgaacatgacagcatgtatattaacggtgatcaaaatcagctgaaacaggtgtttatcaatctgattaaaaatgccgttgagtcgatgccggatgggggaacggttcacatcatcatgacagaagaagagtattccgttaatgtgacggtgaaagacgagggtgacgggataccggaaaacgtgctgaaacgaataggcgaaccgtttctgacaacgaaagaaaaaggaaccggcctggggctgatggtcacattcaaccttattaaaaaccaccagggagctatccaagtagacagcaaaccggatagaggcacggcctttcacattacattcccgaaacaataaaaaacaacggcgttatgccgttgtttaaatagtctgcatggattctctcgtttttaaaataaatgcttccagccggtccaagccttctctcaatgtatccagtgaatatgcgaatgacagcctcacatacccttcacccaactttgaaaacgagctgccgggcacaagagccacacctgcatcctctaaaagagccatactaaaatcaaacgatgacattccgaatgacttaatggaagggaagatataaaatgcgcctgacggctttacgacgtcaagccccattgaaactagacggtcatatacatagtcaagccgctttttatactgttctctcataataagcgcatcatcaacaccgtttgtcaccgcttcaagagccgctttctgagagattgaagacgcgcatgtcacactgtattggtgaacttttaagatgtgcttggcaatttctttcggtgcgaaaatgaaaccgattctccagcccgtcatgctgtgtgattttgacaggccgttgatgacgatcgtctggtctctcaaataagacgcgatcgaataatgcggtctgtcataggttaattcgctgtaaatctcatcagacaggacaaaaacatttctgcccttcaggacggctgcgatgttttgcagctcttcctcagacaatgtcactccggtcgggtttgacggataaggaagaatgacgcattttgtttttggtgtcagcgattcttcaatgagccgcgccgtcagcttaaatccgtgtgtcgtcgtatccacatggaccggaacggcgcccgacatgcggatgatcggttcgtagcccggatatatcggtccggggagaataacttcatcgcccggagataaaatcgtccgcaaagacgcgtcaatcgcttggcttgccccggttgtgacgatgatttcagtttcagcttcataattcaaatcagcttttttcttcatataaagctgtacggcctgtctcagctcaaggccgcccgcattcggagtatatgccgttgcgttctcgtcgattgcctttttggcagccgctttgacatggtgcggcgtgaagaaatccggctgaccgatcgtaagcgaaatgacattgtcgtgctgagctacaagatttgagaatttgcgaattcctgaaatttcaatttcttttacattcggattaagcaaatgttccataattcatcaccttatactatatattgagtttctcctattttaccactagctgagcatttgtcatctttttattgaactatcccgagtatatgtccgatatgtgaaaacataccttctttcagaaaaaaataagacaaccagctgaaatgattgtcttcattgtatcatgatctatctattgtgatatgtggcgaatgtcattaatacccgtattcaaagctgacgtcttcccgccataagatgtatggagcgggcttgtcgggacgctctttcgcctcttttttcatttgcaggtaagccgttttgctgatatcttctaacaccgtcatttgatcttggtcgaatatgactactgtacccatttattacacccttcttcctgaaaaatccttgactattttaccactcgatgtcaaaaagtcaatgggatatcagaaaaaagcatttttttataaagagttcatggccagttggatcgaatacattcactttttccgtttacagccgatatatacagtacaatactgaatgcggatagcgagggattgaattgtctttacaacaatacgatattttattggattcaggcacaaacgaattagaaatcgtcaaatttgaagtaggcgtcaatacatttggcataaatgtgatgaaagtccgggaaatcattcagccggtagatgtcacatctgtgcctcagtctcataaagacgtagaagggatgattaagctgagaggcgaaattcttcccgtcatcagtctgtatacctttttcggcgttgatgccgaaggagcaaaagacgataaatatatcgtaacggaattcaacaagcggaaaatcgtctttcacgtcggttccgtttcacaaatccacagggtgtcctgggaggcgattgaaaagccgacttccttgaatcagggcatggagcggcatttaacgggaatcatcaaactggaagacacgatgatctttctgcctgattatgaaaagatcatttatgatattgaatcggcatccggagttgagacttatcatgtccatcaggaaggatttgatgaaagacgggcgggtaaaaaactgatcatcgttgaagattcgccgcttctgatgcgtcttttgacggatgagctgactgaggcggggtacagtgaaatcgttacgtttgaaaacggaaaagaagcgtatgattacgtcgtggaactgacggataacggagcaaacctgtcagaccatattgacatgattatcagtgacattgaaatgccgaaaatggacgggcatcgtttgacgaagctccttaaggataacccgcaaagctctgatgtgccgattatgattttctcgtccctgattacggacgacctgcgccaccggggcgaagtagtcggagcggatgaacagatcagcaagcctgaaatcagcgagctcattaaaaaagtggatacgtacgtgattgaatagaaaaaagccgatgcatgacgcatcggctttttttgcggcggaattaaaaataactctcaccaagttttttaaatacgggtttatgataagcgggctgctgcctgttggcggcaagcggtttttcctttaagcccacatatttttgcaatacgtttttcgcttttgtcaaagacatttgtgctttaggattgcggtacgattgatttaacgtacctaaatgcggaagatgctggaagtcttcttttgttggaggcatgtgaaaatagtagtctccgatagagataagtacgtctgactgctgttggctaaacctgggattatttgaaaagtgaagccctatttttttccctttgccttctttcacaagcttttgtaatgcccgttttttcagcagataaaggtatttagggttgggggcggtttttgcatggcggttcacagtataaacagcttttgaaagattctcgatggttggctgcagctctttcgaataagcgtggtcgtccattatttctctcctttgcattgatcaagttcatatatagattatacttttttagcgttgaaatgcaaatattgattataaaaatacgcctttttctgatgaaaagggcgcatctttttcctttattatacaggattcgcatgtttttcggaatcagcctttaatgattgctgcacatcgacctctgctgcctcggcgctgtatttcggaagagcgataaaatagaatacaaataccgctaaaatcacgattcccatgccgtaataaaggtaatcaatattggtaacgaatttcggaaataacagggcaaccagtccgagtgtaatcgattgggcaaacatcataaaaggatcctgccagccgctgacccggcccattattttcggatgaacgattttcggcatccagccgccgatggcgatattgacagggccgatgcacatgccgaggacgaaagccgccgcataataaatccacagcttatccgtatagccgaggacaaaaatgagcagtccggctgccaaaataggaatcgacatcaaatgatgcggtttgactttttttgcgatcatcgttccgatcacacttcctgcaagcaggccgaagccgagtgcaacggtaaagatggaagtatgtgattcgtaatgatcaggcgcaagtccgtatttcatcgtaaacatcggcagtacggcaaagccgccgttgacaaaaccaaagataaaaaagccgaaaataagggaagcaagcaatttgtttttaacaatatatacgatcccttccttaaaatcagcgaccgagtctttcagaaacgaatctccccatttaaaagggccgttcggctgacgggcttctttcggaatgcggcacgcgcggatcagaaagcctgatacaataaagctgacaaaatcaaggataatggctccgtgaataccgatcgttttatacataaacgcgcctataccgacgccgaataccatgaagatgctgaacaggatctggttaagtcccgccgctttcgcgtaatgctccttaggcagaatagcttgtacaaggctggcttccgccgggaaaaagaacttggtcacggcgcttctgatgaacaaaatacagaacacgagagggatactcccggtgtataatgcggcaaacaatacgatcgtcagtccggctctgatccagtcacaattctctgcgacctttttcctgtcaagccggtcagctgcgacaccgacaatcagaaatacgaaaactgtcggcagtgaatacatcagctcagccaaagtcgtgtatgccggctggtttgaaaaatggtccagcaagtaaaaagcgaaagccatattacctacagtcgttcccatttgagaagcgagtgctgcgaaaaagagacggacaaaattgcgatttttaaatatatccataaacacgctccttaccctaaaggtcccactgtaatatattatcatcagctcgttccattaacaaataagatctttctatcttataatagtcacccttgttccattaggaacggcagcggcaagttcagtgacgtcctgattatacatccggatgcatccttttgataccgctttgccgatggaggaaggattatttgttccgtgaatgccgtaatgaattttagagaggctgagccaataagcgccgaacgggccgccgggcttaggctggcggttcacgatgtaaaattctccggtcggcgtggtcgtcaatatttttccgactgcgatgggatacgtacggatgagcctgccaaggcggtataactccagtttcttcgctccgatatacacgatgatggagtagggaatggtggatgggtcgggaagattcggtatgataatatgctgtcccgcgtatatgaccgattggattgagggatttgcctgaaggagagcagcagtgcttattctgaagtcttgcgcaatgcttgagatggtttctccttgtttcacttgatatgtcagcagtttcatcaccctcctttttgctcttttccatatacatattacggagggggtgtctgtgcatcaggataaaagtcttatttttgctcggttttcaatgtgaacagcgtgatttccggtctggctaaaaatcgatacggcagtcttgtcgtaccgagcccgcgattgacgtaaacggctgtgtcatgcagtgtatacatgccgtcggtatacgtttttccgtaaggaggcgtaatgagagggccgaaaaacgggagctggacctggccgccgtgagtgtgtcccgacagctggaggtttacgggatatccgcctgtcttaagagcggcatcaggctcgtggacgattaaaatggaaaacgcatcttcggaaaggcgtgacagggtgccttcataatctggttttccgagtattacatcatccaaaaacgcgaattcaatccggcttccgtctgtcagctgcaccttacggtagccgtttcgaagcacttgaaaatcagccgcttccatcagagccttgtacgtgttcgtaccgtagcctccatggtcatggtttccgtaaacacaaagtttgccgaagggagcttcaagattttgcagcacggcgagtgcacgctggtgatcattaaataaatgcggcttatcaattaaatctcccgtaaagatgagcaaatcgggtttcagctgattgatcttttccgctgctttattcaagtcaccggatgtaaacacatcactgagatgcgtatcgctgaattgaacgattttaaaattgtcaaagccgcgggggatcaggcggctggtgattgtatgccgggtgacctcaatcatgcgcggttcaatataccgggcatagccgtaacctccgcaagccattgcgagagctgcacccaaaatgccgaatcctctttttaaaaatgttcttctggtcattttctccatatgtaaaaccaacctttgtcagagttgttctattatatcatcagcctggctgaaaaatcccttctcagcatgtaatgacgcggatagacatctgtgataaaattatgaatgattattcattcaataaaaaggggtgggtttgttatggataagaaagcggtaatcattacaggcggttcaagcggcatgggaaaagcaatggcgaaaaaacaggctgaattaggatggcacgtcatggtgacagggaggaaccatgaagcacttgaggaaacaaaaaaagaaattgagacctttgagggacaggtcgcctgttttcaaatggatgtccgttctgattccgccgcttcagacatgattacagaagcgaaaaaagtctttggccggctcgatgcgctgattaacaatgcggccggcaactttatttgcccggcagagaagctgacgcccaatggatggaaagctgttattgagattgttttaaacggcacatttttctgcagccaagcagcggcaaggcattggatcgagcaggagcagaagggcgtcatcttaaatatggccgctacatacgcatggggagcgggagcgggtgtcgttcattccgctgcagccaaagcgggggtattgtcactgacaagaacgctggccgttgaatgggggagcaaatacggcatccgcacaaacgcgatagccccaggcccgattgaacggacaggcggtgcggagaagctgtttgaatcggaaaaagcggtgtcccgcactatgaacagtgtgccgctcggccggctgggcacaccggaggaaatcgccgcgttggcagcgtttttgctatctgatgaagcgtcctacataaacggggactgtatcacaatggacggggggcaatggctgaatccttatccgttttaatttttcatatattgattattttgcaaaacaagcgaacgttaaagccgccgttcgcttgttttattttctattcaaaattatgatataattttgaaagattaaggggcgattaattgaagaaattatgaaaatggttcgttgtactatttgtaagcagtttcgttatcatctttaatatttggtactttattatttgtgcttttactccggagtattatcaaaataccaatcttacatctgatgaaataatcagatttgaaaagctatttcacatagattttcctgatgaaacgaaatttattaaagccagggagtatttgagtgggctcggaggcgatacatcggctgtattatatgtgtctctgccaaccaagctggcggaacgattttatctgattatacgtatatgccaataaatcatactgatcatgccggttcaatgtatggagttgacgtttccgagagtgttggcgggttaacaactcttacatgtggcactttagataaaaaaggaactttctttcagttgaaacatgatgatgattggatatttaacagcactgattggagccattatttttggacagatgccggttataatgctcttatatttatccttttatttgtgcttgcgaaacaaatgaataacgtccttaattaaccggtctgaagagtgatcttaaaaatgtccccccttttattttaagctgctgccatactgcctccttttcccctaatctaaacatttgtggtgctgatataattgtgtataatcagacaaagatagagaagcaggtgataacatgttggacccacttgatatactgacgaatattgatgatgtcattccgtattaccaagcgatttttaacgctgaggaacaaagagtcgtaggctacgaagtgcttgggcggattttggcagatgcggagattgagagcctcgggccgtttttcttagattccggcattccggaagaatataagcttgaggtcgatgacagagtcatcaggcaggcgctggagcggtttaaagaagctgaccgtgatctgttgatttttatcaatcaggatgcgaatgtattgatgcttgaccacggcgaaagttttcttgagcttttgaaagaatacgaagagcagggcattgaattgaaccgtattgtgcttgagatcaccgagcacaatttcgaaggcgacattgaacagctgtaccatatgcttgcctactatcgtacatacggcattaaaatcgcggtggacaatataggtaaggagagcagcaacctggacagaatcgcgctcctttcaccggaccttctgaaaatagatttgcaggcgctgaaggtatctcagccgtcaccatcatatgagcatgtgctgtacagcatttcattgctggcgagaaaaatcggcgccgcgctgctgtatgaagatatagaagctgatttccagctccagtacgcatggagaaacggaggccgattttttcaaggctattatctgcaggcgccgagtggcgattttatagaccggagcctgttaaaagcacgcttgaaaacggagtttcagcaatttatcacgagagaaaaaaagaagctggaaacggtctatgaacactctgagaatttttataagcgggtcaatcaggcagtttccgagctgaagaaaacccatcaggcggacgatgagtttattaaaaaactggcggaaaacctgaccgactgctgcttcagaatttatatgtgtgatgaagaaggctatcagctgacgggaaatgtgttcaagcagtccggcgaatggctttatcagcctgaatacatggagaaaaactggagctggcgtccgtactttttagaaaacatcatgaagatgcgtaattcaagaaaaggctttttcagtgacctgtacagtgatattgagacaggtgagatgatcagaaccttttcatacccgatggatgacaatatgtatttatttatcgatctgccttactcttatttatatgaacaggacgggttactttaaagcggctgctgtatgccgctttttttgttcatttgaaaaaagttttaaaaaacgattgacaatgatactgataatcattatcatttagttatagagagaagttactctctgttccccaacccctctatcagatcaagatccgaaaaaacttggcgctacccccgccaagtttttttatgctgtctcctcataaaagggcttctccttacatacatctgataaggcggctcaaaaagcgaaaaattatttttgaaaggtgtatgacattccgaaaaaagcttcaaactattcgcaaacacggtttttcccgtttatttctttttgaaaatccagcgggaaaatgccatcccggtctactttatggtatgatgctctgtagaacttgtattataataaatacttgttgatttgaagttgttttttgaaaggagtctttttttagaatgtcacaattaatgggtatcatcacgcggctgcaaagtctgcaagaaacagcggaagcggctaacgagccgatgcagcgttattttgaagttaacggcgaaaaaatttgcagtgttaaatatttcgaaaaaaatcaaacgtttgaactgacggttttccaaaaaggtgaaaaacctaacacatatccgtttgataacattgacatgatttctattgaaatttttgagctccttcagtaatttgatttgatttttcaggctgaccaagcttccggtcttccgcaagcggagctttattaaattatgcaaaggaacgtgcttgttcgtttggttgtagactctggaaagaggagtgtccgtacatggctgattcttttctgttttataatctttctgaggcacagatgacctttcaagacgtgacggagcggctgaaacgctttgtcaataaagacccccgttcagcatacgtgctgtctgtagggactgattcacaagtttaccgcgacttcacaaagtttattacggctatacacttgcaccgtacaggcaagggagcttggggctgtttgaaaaatcacgatcttgcaagaccgatacatagccttcgcgaaaaaatttcgttggaaaccgcgttcagccaggagatggctgcgcatatcctcgacggccgtcttatggaactgacagatttgctcttgccttttgcggatgaaggggcggatctttcatttgaagtgcatctggatatcggtcaaaaagggctgacaaaagaattgatacaagaaatgaccggccgcattacctcgatgggcattgaagcgaaaatcaagcccgattcctgcacagcattcagttatgccaatcgttacacaaaataatatttcatacagaatccgcaaaatgtcgaattatgcggttgacgatttttttctgtttacttattctagcggtagagctgaaagcaaatttcacgttgctttcggaggtattcagttaaaaatagggggcctgattacgtatgagtcttatcggtgaacgatttacggaagaagaacagaaacttctgctgaatatcctgatcaatcaagaatatgccattgagcttttgaccagcgaaatcaacgatatagaagcagggtcaaaaagcgttgatggaaccacttataaaaaactcgtaacgctctatgaccgttttcggaatgaaaattaatcagcggcctataaattgatactcgattgcaaagagtatcttttttattgacggaaacttttcgacaaaaaatgataatgtttatattattgcaatatagggaatacatgctttgatgaaaaatgtaaaggggtcgaagtgacatgattagcttacaatcagatcagcttcttgatgcaacagtcggacaatttatgatcgaggcggataaagtggcgcacgttcaagtcggaaacaaccttgagcatgctctattagtgctgacgaaaaccggctataccgccattcccgtccttgacgcttcgtaccgtctgcacggtttgatcgggacaaatatgattatgaacagcattttcggacttgaacggatcgagtttgagaagctggatcaaattacggttgaggaagtcatgctgaaagacattccccgtctccacatcaatgatccgattatcaaagggttcagcatggtcattaacaacggctttgtctgcgttgaaaatgatgaaggcgtctttgaaggcattttcacgagaagagtcgtattaaagcagttgagcagccatatcagatcattgaataagtaggctcgcacgatcagcctatttgttcttttgcatgccggaaaaagaaaacgcatacatatgagtggcgcttgcctcggcagcctttattttattagaatggtagataagaaatacgaaaaggcattgaaaaggaggacgacatgcagcttcaagagcttcatatgctcgtagttttagctgaggaattaaacatgaggaaggctgccgaacggttattcgtgtcacagccggctctgtcccagcgattgcagaccattgaaaaagcctggggaacaaagatctttcttaggtctcaaaaaggacttacggtaacgccggcaggagaaaaaatcatacaatttgcaaatgacgtcacggatcggcaagaaagaatcagagaaaacattgatgaacttgagggtgagattcacggcacattaaagcttgccgtcgcctcgattatcgggcagcactggcttccgaaagtgttaaaaacatatgtggaacgatatccgaatgcaaaggtctctctcattacagggtggagcagcgaaatgctgaaaagtctgtatgaagatcaggtacatatcggcattatccggggaaatccggaatggaaaggccggaaagattatttaatgaccgatcatttatatttggtcgatacggaaatttcctgtattgatgatattgcccataccgaccggccgttcatccaattcaaaagtgacagtacatattttcaggaaattcagcattggtggcatcaaaaattcaaaacctcgccgaaacagaccatccttgtcgatcagattgaaacgtgcaagcagatggcgctgcacgggatcggatatgccattctgccgtcagtcaccttagaagaggaagacaaagtaaataaaatgcctctgcttgatacaaaggaccatccgatcggccgtgacacatggctgctcggttatgagccggcatttgaattaaaacaggtgcaggcttttgtttctgtcattaaagatatgctgaagcaggaacgcccattttagaaagacagcaatcatgctgtctttttttattttttattgacaatgaaaatcattatcatttaaagtgttatatatgttaatgaaaatcattatcaattacgaggtggtcatatgcagaaagcattaatgatatacgcaagcatgtcggggaatacagaggatattgccggcattataaaagaaacactgagcgggcatcagatagcagttgactgtcttgacatggacgaagcagatgcggattctctcgaagcatatgattatgtttttgtcggcacgtacacatggggggacggtgatcttccttacgaagcggaagatttttacgaagatattctgcacagccagctcaacggactgaaaacggcctgtttcggttcaggcgatcacgcctacccgaagttttgcgaagcggtcacgctgttttgcgatgcgtttgaacaggccggagccaatttatatccggaaacgctgaaaattgagctggcgcccgagacggctgaggatcaggaatgctgcaaagaatttgtccgcggttttcttgcatgggccgctcaccacggagacaagtgccatgtttcataaaggcgcgacggctgtgatggcatcagtatcttcgggattttttgtggctgtgaaaggcgaaggtatttttcatttttcggcggaagaaggctggaaaagactgttccgagtgaaaagcagaattcatgtgctgacttacatagggccctacatattcgcggctggagaaaaaggcgccgtcctcagatcagccgatcagggaaagacctggacggcctcccggtttccgaccagcgcctccgtatgggccgttgccgggcggaatgacgggtttgtctgtgcgcacggcacatactgcctctacttatctgatgatttcggcgtcacttggcatgtggctaagcccttttcacaattaaaggagccgcctgtcatccgttcgctttgtttacacggtcagacgatttatatcggcacccggattcacatgaatcatggcggcatttgggcgtatgatctgacggaagaccgcatccggcgtataagccgcgaaaggcagcgcatgacggcttcaatgaggatgtatcagaatgactggctcattgcagcaaagggcgcggcaaagggagaacggggggaggttgccgtccgaaacgtgcggacgcaagaggagtttgccattacagccggacccgccgtacgggaaaaatcatttctcgacgtttctgaggataacgggattatttatgtcacatcgtcacaggacgaaaacggattttcgcgtatttatcaagctgatctcgccgccggtgaattaaagtggtttgatacgatccgcggtcacggatggcgggtggccaaccgggaagaaaactttttttgcgcgggcctttacgaaagtaagtttgtcagaccgtatgaagcggttcggctcgcacattagtttttatgcataaaggagagacgaagatggggaatgtattgcttgtttacgctacaatgtcaggaaacaccgaggcgatggcggatttaattgaaaaagggctgatcgaagcacaagcatccgtagacagatatgaagcgatggatattcatgccgaactttttaatgattacgagtatattttattaggcacatatacgtggggagacggggatcttcctgatgaaatgctcgatattgctgaagatatggaaaacctggagtttacgggaaaaacatttgctttgttcggttccggagatacgtcctatgagtttttttgcggggcggttgacgaattggaaaaagtaatcacggcccgcggcgggcgggtggtgctgccgtcggtcaaaattgaaaacaaccctgagggcagtgaggaagaagagctccgggaattcggaagacagtttgccgcgctgtgcagccagccggcagaataaaggcttgttcctttttttcttgtctttgtatccttcctttgttacagtaatgaggtagaaaatcagaggaggacaatacatatgaaaatgatggatgcaaatgaaattatttcatttattcaaaatagtacaaaatcaacgcctgtaaaagtgtatgtaaaaggcgatcttgaaggaatcagctttggcgattccgctaaaacattcctgaacggccaatccggcgtcgtttttggcgagtgggctgaaattaaaagcgcaattgaagaaaacaaagacaaaattgaggattacgtcattgaaaatgaccgccgcaactctgcgatcccgatgcttgatttaaaagatgttaaagcgagaatcgagcccggcgctattatccgcgaccaagtcgaaatcggcgacaatgccgttatcatgatgggggcatctattaatatcggttcagtcatcggcgaaggtacgatgattgatatgaacgttgttctcggcggacgcgcgactgtcggcaaaaactgccacatcggagcgggttctgtattagcgggcgttattgagccgcctagcgctaagcctgttgtcgtggaagacgacgttgtgatcggcgcaaatgcggttgtgcttgaaggcgtaacaatcggtaaaggcgcggttgtcgctgccggagccatcgttgtaaatgacgtcgagccatataccgttgtagcgggaacacctgcgaaaaaaatcaaagatatcgatgaaaaaacaaaaggcaaaacagaaatcaaacaggaattacgccagctgtaaggaatggtttgatagaatgggcgtggatgataaaatccacgccttattcttatctcaaggaggaatacatatggaaaaagagcggctcattgccatccgaagagatctgcaccgcattccggagatcggctttcaggaatataaaactcaacagtacctgctgaatctattgaaccaatatccggaggaaagaattgaaattgaaacttggagaaccggcatctttgtcaaagtcaacggcacggctccggaaaaaatgctcgcctacagagcggatatagacgctctgtcgattgaagagcagacggggcttccgtttgcatctgaacaccccggttttatgcacgcatgcggccacgatatgcacatgaccatcgcgctcggcattattgatcattttgtccatcatcccgtcaaacatgatctgctctttttattccagccggctgaagaaggaccgggcggagcggaaccgatgcttgaaagcgatgtgctgaaaaaatggacgccggatttgattaccgctctccatatagcacctgagcttcctgtaggcacaatctccaccaaaagcggcttgctgtttgccaatacgagcgaactcgtcatcgatctcgaggggaaaggcgggcatgcggcatatccgcatacagcagacgacatggtcgttgccgcgagcacgcttgtcacgcagctgcagacggtcatatccagaaatacggatccgcttgacagcgctgtgatcactgtcggaacgattaccgggggcacggcgcaaaatatcatcgcagagcatgctcatctggagggaaccatccggacgctttccgaggaatcaatgcgtatggtgaaaaagcggattgaagagcttgtcaaaggaattgaaatcggcttccgatgcaaaggaaaagtcacgtatccgtccgtttatcatcaagtttataatacaagcggcctgaccgaagaatttatgcaatttgtcagcgatcatcagcttgctgacgtgagaacggcgaaagaagcgatgaccggagaagatttcggatatatgctgaaaaaatatcccggctttatgttctggctgggggccgattcatcccacgggcttcatcacgccaagctgaacccggatgaagatgcgatggaaaccgcggtaaatgtcatggtcggatatttttcgaagtatgccaattaaatccgaaaagaagaataatctaacaaaaattgagcattctacataacggaggtgttcaatatgacgaaaaaaattggaattgaacaatctttatcggatgtagaacaggcgttaaaacaaaaaggatatgacgtagtgatgatgaagactcctgaggatgcgaagaattgtgactgctgtgtcgtaaccggacttgacagcaatgtccaaggaattgccgatacgtcaactcaggctcccgtcattacggcttccggaatgaccgccgacgaaatctgcagcgaagtggaaaaaaaatttcattaaaaagaaaaaaccgaagcttacgcttcggtttttctattcggcggaagcggcgtttttaaaacggtcgagcgcgatttttatttctctccgcagtacgcgttcaacccgccattgctccatattttctgttttggcaatgattctgattaccatttctgacgtgcttaaatcctgaaccccgatgacgtccggcccttccttaatctgcgggagctcagcggctgctttgtcacacgcggtttgcaggatttgaatggtttcatcaagatttttttcaagcggcactttaatatcgacaagcgcctgcatcgttccgcgggaatggttgctcacattcgtaatgccccggttgggaagatagtgaagcgtgccgtcaaagctccggatttgcgtcgtacggagaccgacctgctcgacaatgccgctgtagccggcaaccgtaatataatcgccgacgtcgatctgtttttccaaaaggataaaaaatccggtgacgatgtcactgacaagcccctgagccccgaagccgactgcgagaccgaccacgccggctccggcaatgagagcgctcggattgtagtgaaataaatccaaaatcatcacgataaaaacgaaaatcaggatgtatccatatacattaagcgcgaggcttcgcaaagtataagcgcggcctgtggagaggttgttttgttgctcgaatttctgaaacagatgcttgatcagcttttttcctgccgcccggaaaataaagtacgctaaaataatgagagccagctttatgatgaaaatcccggcagatgtgagaagcccggcccagtcaaagtgttttaaatcaatcatagtgatgtcttcctttcaagtcttttgcggaaaaagctaaaagtgatatacccgtttttaaaaaaaataaaccttttaatagaaaccagttatttcatttatgatttgttcatattgcccggtttcaatatcatcatttttgtgaagatatgaactaaggaatcgccacactcattttaacatggtgattcagccaaatcatatcctttggagggaaaacaggggaatgttgcccggcgaaactgaaagccccggcaaaaaacctttttcataaggagggaaataagatgaaattacgtcagcaaatgcctgaattgacaggcgctaaagcatggattaacagagaagtcacgaaggaacagctggtcggcggaaagccggcactgattcacttctggtccgccagctgccgcatgtgtaaagaagcgatgcctgagatgaacgaatttcgtgataaatataaagatcagctgaatgtgatggccgttcacatgccccgttccgaagacgatcttgaccttgagaaaatcaaggaaacagcggctgaacacgatatctctcagccgatttacgtcgacagcgatcatacgctgactgaagcatttgaaaatgaatatgtgccggcttattaccttttcgataaaaccggacagctctgccattttcaagcgggaggaagcgggatgaaaatgcttgaaaaacgcgttagccgagtactttcagaaacggagcaggcttctgagtaatcgggacaatctccgtcggactattgtctcggttctgcaaaccctttgccgtttaggtaacagggtttttttgtgcctattggataaaaaattccaatatgacatgtgcggcttgaaaaataagagaaacagccgtaaacacgctgtaccgcttgttttatcgatatcattatcttttacatattatagtcgaaaattgtagatatcacgctaattttcattaaacaagtaatttcaagttatattttgaaatggttgaataaattggtactttgtccagaatcccctatatgacaagggatttttgtatataaagtaccattttcagaaaataagcaatttttcatagagtaaataaaatagtaaaatgataaaataatagttgataaaattacttttgtaatctaatatcttaataaaagcgtttaaatttttgacagggggttttacacatgtttaatgaaagagaagcgctgcgcttacgtttagagcaattgaacgaagcagaggtaaaagtcattcgtgaatatcaaatagaacgtgataaaatatatgcaaaactgagagaattagacaatacaggcagcctgtccgatacaaaaaaagagtttcgtccggagaaaaaaagtgactctctcccggtgcttgcagagcttgcagcacaggaaatgagaagctatcaaaagccgcaggcacagcctcaatcctcccagccgcagatgcagtctattacgtctcttcccgccggcattccagacggttctacaagaagaagaagagggacggcgagaccgggatcaaaagcggcaaaactgcgcgaagcagcgattaaaacattgaaacgccacaatgcagcgatcaaaagttccgaacttcaaaaggaaattgaaaaggaaagcggccttgaaattcctaatatgacaacatttatgcaaagcttaattaaaatgtatccggaagtgaaaaaaccataccgcggccaatatattcttgagggagaaatttctcaggaaacagcagaaacggcaaatgatacggctgctgaataataaaacagtaaaaactgcttgcgttactcaagcagtttttttgcgttttcccgcttattctgcggaagtgacgcctcttttccaggctttttttcaagcttgacgacatatttttggaaaggcttttcgccgtcagcacgttctttcaacgcatccagtttttcatcaaacgactgatcgcgtgactctgattgtacaaattgtttttgcagggagatgacttgttcggtaacggctttaagcaagtcttctgcctgaacagtctctttggaaacagaagggatttccagagcttgttccgccggttccgccgtgcggctgtcaatatcagcaaaatggccggcaatccaagcatcactttcgtccagctgccgtttatacgaaagaatggtttcttgaaataacttttctttcgttttttctatttctacaagccgttcttttgtttctagtattcgatctctcatatgattaatttctattttaatatgtttgagctggtattctttttctatcatttgtgtttgaagccgggtattttcgtctgcagcggcatgataacgctgtttcatatcttcgtgagaagtccgttcagtttgaatggcggtctcaagtgagcggatgcgggtatgtaagtttttattttcttcttcaaattttacatttgtaagatgcagacggtgcttttcttccatctcatttttccgccgaaacgtttcctgctgaagcagttcttgcaaaatgacgattttatcgagcagcccggctctgatttcatgcaaagaacgttccgtgtcacttgtctgtttgtgtttttgagccatggcttccaattcgtcagaaagcttgtgaagccgctctttaatattggcgttttcctcctgaagcttattatttttttgatggaagtagcttgcttcaaattctgaaattaattttctgcatctggaaagttcggatttcaagtaaaggttctcttgagaagtgtcgtggaaaaacggaccggatattttcataagaaccatctccctcatgatgttaacactacaatatgggaaaggatcaacggctattcctcttaattaaacagacaagcaccgtaatattgtatttcggctgaggcgtttgctatgcttttatatagaatgggagagagatgacatgaaacgggtgaatgtaatattagcggggggagcttcccgaagattcggagaaccgaaagcttttgcaaagtggaagggcggcatgttttatgaacaggcgaaaaaagccttcggcggcggagaaacggtaattatcagccgccctgagcatataaaaaagttcttatcaaacagggagcggcatgttttggccgatgagccgcggtttcgggcaatgggcccgcttgccggcatctatacggcaatgaaacaaacggaaggcgaaatatatacggtcatatcctgtgacacgccgctcgtgacaagaaaaacgatggctgcgcttgaaatgaagctgaccggaaacctggacgctgtcataccggtttgtgaaaacagagagcagcccctcttggcggtttaccataaacgggtgcaggatgtgctttttgatcagctgacacaaaacaaactgaaaatgacagacacgctgaaacggctgtctgtctgttatgtgcaggctgaagacatcggcgccgggccggaggagttcgctaatatcaacacacaggacgattacaccagacttttggcgcatgtcgagtcttcaaatcaagactgatcgggaagaaacatggtatgatggaaataaaaatgcaaggggacaacacagatggaagagcgctattcgcgtcagacaagatttaagccgataggggaaaaagggcagcaggcgctggctgacagcagtgtcctgattgtcggagccggagccctcggaacagccgcggcagagggcctggcaagagccggagcgggccgtatggcgattattgaccgggattatgtggaatggagcaatttacaaagacagcagctgtatacagaagaagacgcgagacagcgcctgccgaaagcaatggcggctaaggcgcgtcttttggcggtaaacagtgatatacatatcgatgcttacgcggcggaaggtacggcggaaacgctcgaaccgctgatcgaacaagcggattgcatcgtggatgcgacagataattttgaaacgagaatggtcatcaatgatctggcgctgaaaacgaaaacaccttggatttacggtgcctgtgtcagcagtcagggaatgtgcatgacgattattccgggggttacgccgtgtttatcctgcctgtttgagcaaatgcccgtgggcggagcgacatgtgatacagcaggtatcatacctccggcggttcatatcgtttccgcttatcagcaggctgaggcgctgaaattgctgacaggaaatcatgcagcggtaaatcggcgctttttcacgtttgacgtgtggaataacaccaatatgagcataaatgtggatcagatcaaacgggatcattgcccttcctgcggcgcggagcccgtatatccgtatctgcagcctgaaaacaggccgaaagcaagcgtgctgtgcggaagagacaccgttcaaatcagatcggaagccttaaagaggctggataaagaagaacttgtcaaacgtctgaagcagatcggtaaagtggaagcaaatgaatttctgctgcacatggcgtatgagcgcttcaggatcgttatttttcaggacggacgggctttgattcacggtacaaacgatataaaagaagcaaattcagttctggccagggtgatcggcctgtaggaaggggagatattgctatgcttgaaaaaagaacgccgattcaggtggacgaagcagtccgccgggtgagccggtataaaaaacagggggataccgaatgggtggcgcttgaggacagtctccaccgctatttggcggaggatgttaaggcggatcatgatgtgccggcctttaaccgttccccgtatgacgggtttgccatcagggcgagcgattcaaaaacggcttcccgtgacaatgccgtcacctttgaagtcattgaccatatcggagcaggcgccgtgtcggaaaaagaactcgggccttatgaagcggtccgcattatgacgggggcgcagattccaaaaggcgcggatgccgtagtgatgcttgagctgacaagaacgttttctgaaaacgggacgaattacatgtcagtgaaacgccctttccatgcgggcgataatatttcatatcaaggagaagatgcgaaaaagggcagctcgctattaaaaaaagggacgaaaatcacgccgggcgtaaccgctcttttagcaaccttcggctatgcttccgttcccgtggtcagaaagccggttgtcggcattatcgcaacggggaccgagcttcttcatgtcagcgatccgcttgagccggggaaaatccgcaacagcaacgctgcgatggtgtatgcccaggtcattgaagcgggtgcagtaccgctgaacttagggaaaatttccgatgattttgatgacagctatgatgcggtgaaggaagctatgaaaaaagttgattttctgatcacgaccggcggcgtgtcagtcggcgattttgattttcttccagacatttataataagctcggagcggaagttctttttaacaaagtggcaatgcgcccggggagcgtgacaactgtcgcccgggccgatgacatgctgctgttcggcctttcaggcaatccgtccgcatgttatgtcggattcaccctgtttgtcaaaccgatgattcagacgtggcttctgaatgaaaaacctcattccggatgggcggaagccgtgttaataaacgactttccgaaaccgaatccgtttacgagatttgtgagggcgtttgtttatcataaggacggaaagatgatggcgtcaccggtcggcctcgacaaatcaagctcagtcacatctctagccgaagcaaacgcgtttatccttctgccgggaggaacgaggggatatgaagcgggccggacggttcacgcgctcctcatccgtgatgagaatggaagtgaatggccgtggtcaattctttcccgatcgtccagatcgtaggttttcaaaacagcggtaaaacaacgtttattgaacgtgtgctgaaagcggcgccgaaagagtgcgatattggatgtttaaaacatcacggacatggcggagagccggaacctttttctgacggaaaagactcggagcgtttttcaaaagccggagccgcggttacggcagtagaaggggacggcgtcctgcagcttacggcgcgaaaaaaatgggatctggcgggtttgatcagtctgtatgaatgtctgggaattgacggtcttctcatagagggatttaaacatgcgccgcatccgaaaatcattatgatcaaagacagcgaagattggcaaaagctgaagcatttggagcgcgtgatcgcggttgtcagcagaaatacggagcatatgccggcagatgccggcatgcccgtattccatgcggacgatccggctgccatgatgtttgtgctttcgcagctgaaaggggaatctgcataaatggaacgttttcaaattacaagggaacctatcattgccgaaaatatcgtaaaaaaagttgaaaagcgtgaagccggcgccatcacaacgtttatcggcacggtcagagagtggactgccggacggcggacggtgcgtctcgaatatgaagcgtatgaaccgatggctgttcaaatgctttctcaaatcggcgatgaaatcagcgcgaaatgggaaggagccgaagctgcaatcactcaccgtgtcggcgtccttgatatcggagaagcagcggtcgtaatcgccgtgtcttctccgcacagaaaggcggcatatgaggcgaatgaatatgcaattgaacggataaaacagattgtgccgatatggaaaaaagaaatctgggaagacggagaagaatggataggcgatcagctggaaacaacgccctatccgaacggaaaaccggatttgcataaaggggaatcgcgatgattaaagtattattgtttgccgggcttgcggagcaggcgggaacaccggtcattgaacttgacgaaaaagagacggcggcgtctgctgtaaaaacgctgctaaaggaacggtacggccttcagacgattgacaatgccatgatcgcaatcaatgaaacatatgtaaaagacaacagcatcgtaacagaaggtgataccattgcctttatccctcctgtaagcggagggtgaaaaaagagccggatgtgcatcattgccatccggcttttttgtatataggcgctgaattccagagaatatctaaatgggatttaaagggatttgcgattgggctggttttgactgcatgaataggctgaagacagtgccttcacaaggctttgagcctcccgtcgcacggatctgacaatgcttttttttacataattatggaacgtaaagctgagaatttgtgttacaatttagcataaatacgcaaacggcaaaaaaattgaaacttctctcagcctaaagcgtacgtataaacagaataatacataggaggcatcagcaatatggaaccaaacctggaaaaaggcaatacggcagtaacggaaaagccgtcaattttcggcgtcattacaagtcctgttgtgcagtttaaaagattaaaagaaaagccggtcatcggcattcctctcctgattgtcatcattctcatcgcggccggcagtattttgcgcggactggggatgaattatgaagaagtgctgaacagcccatctcttgacggtttgacggatgatcagattgaaatgaccaaaaccttcgctaaattcggctcgatgttcggaggaatcttcgggggcattatcgctctgtttatcgttccgctcatttactggctgtgcgtcaaaatttcaggcggcgtgacaacttacaaaaaaatgctctcactcagcctgtttacggcatttattaccaatatcggcttagttattaacggtcttgttacttattttaccggtgcgggctcattgtacgccgtaacatctttggcgagtgtcataccggccggagacggcgtcgcggtctttttaagcgcgttcgacattttcagcatctggagctatattctgctcgctttgggacttcgctatacaggcggcatttcgaaaaaagcggcctggacttccgcgattgtcctgtttgttattatgcttttggtttcggcagtcggaggactgttaagttcagtgacagcaggtgtataacatgaaaaaaatttggatcggaatcggcatcgccgtaattgttgcagtattcatcggtatcaatatttataagtctgccgctcccgcgggcggaagcgccgggaaaaaaatcgaaaccggaaccatggaaaacagagaaatctcctctacggttatggttccgggaacacttaaattctctaaagaacagtatgttttttatgaagcggataaaggaactcttgataaagtgaaagtaaaagaaggcgacaaagtaaaaaaagggtcgtcgttagtcacgtatacaaatgagcagctcaatcttgataaagaacaaaatgagttgacagaacaatcaaaacggatgcaaatcgaacaagttgaagaaaaactcagagcattaaacagcaaggaacaagatctggcaaaacaagtgggggaagcggaagccaaaaaacaaattgaatccgaacggactgatctgcagcttcagcaaaaaacggcggaaatcgaattaaagcaatctgatttgcaaaagcagtctcttgaaaatcaggtggcgaatctcaatgttaagagtgagatggacgggacggttatctcggtaaatcaagaagcggcttctaaaaaatcggatattcaagaaccggttatacatataggagacccggaacacctgatcgttgccggcaatttgtccgaatacgacacgctgaaagtgaaaaagggacaaagcgttacaattacctcagacgccattccaggtaaaacgtggaaagggagagtggcggctgtcggcctcgttcctgatcaaaagtcaagcgctgcttcgggggaaagtacggaacaggccgtgcagtatccgttccaggttaagctgatcggaaaccttccggagggcaagccggggtttaaattaattatgaacattgaaacagacaaacggaaagccgatacgctgccgtcctccgcggtcaaaaaagacggagatgagcactgggtctttacggtaaaagacgggaaggccaaacgcgtgaaagttaaagtcggcgataccgcaaatcagcttacggagataaaagaagggctttcaaaggatgataaagtcattctgaatccggctgacggtttgactgacggaacggatgtgaaagcatagatgattcagctttcaaaggtgaaaaaaagctatcagatcggcaaggagacgtttgatgttctccgttcaatcgacttgacgattgaagaaggagaatatgtgtcaattatgggaccgtcgggatcgggaaaatctacgatcatgaatatcatcggctgtctggacagaccgacgtccggcagttacaggcttgcgggcgaagatgtttcttcatgcaccgaaaaagagcttgcggcggtccggaacaaatcaatcggatttgtctttcagcaatttcagctgctgccgcgattgaatgcaagaaaaaatgtcgaactccccatgatctacgccggtatcggcaaaaaagagcgtgaggaacgggctgagcatgcgctggaaaaagtcggtttggcggatcggatgcgtcacatgccgaatgagctgtccggcggtcagaagcagcgtgtcgcgattgcaagagccattgtgaacgaaccgaagctcattttagctgatgaaccgaccggcgcgctggatacgaaaacaagcatttccattatggagcagttcacagagcttaatgcagagggcgtgaccgtggtgcttgtgactcatgagcctgaagtggcggactgtacaaacagagtgattttcgtccgtgacggcatgatcgtttcccgcgatgctgagcagaggagagtgggggaatgagcctgtcagaaaatctccggatggccctcagttccgtaagagctcacaagctgagatcgattctgacaatgctcggaatcattatcggcgtcggttcagtaatcgttgttgtggctgtcggccagggcggagagcaaatgctgaagcaatccatcagcgggccgggcaatacgattgaattgttttacatgcccagtgatgaagaattaacagccaatccgaacgccttacaggaagcgagttttacagaagaagatattaatggattaaaaggagtggacggcgtaaagcaggttgtcgcttccgcggtaaaatccatgacggcccgttaccatgaagaagacacggatattacgctgaacggcattaacagcggctacatggacgtaaaaaagctggacgttcaagatggacggacatttacggacaatgattttctttccgggaaaagagcaggaatcatctcgaaaaaaatggctgaaaagctgttcgggaaaacgtctccgctcggaaaaatcgtctgggccggcggacagcccgtagaagtaatcggcgtactgaaagaagagagcggttttttatcgttaggactcagtgaaatgtatgtgccgttcaacatgctgaaaacgtctttcggtactaacgactacagcaacgtttccgttcagacggagtccgctgatcaaatcaaatcaacaggaaaagaagcggcccgtctcttaaatgacaatcacggtacaaaagaggcctatcaagtcatgaatatggaagaaatcgcggcgggaatcggccaggtcacgaccgtcatgacgacgatcatcggttcgatcgccggtatttctctcgttgtcggcgggatcggggtcatgaatattatgctcgtatcagtgacagaacggacaagagaaatcggcatccgcaaatcgctcggtgccacgagaggacagattctgacacaattcttaattgaatctgttgtgcttacattaatcggcggcttaatcggaatatgtctcggctacgggggagcatcactcgtttcccttatcgcaggctggccgtcgctcgtttcctggcaggtggtttgtatcggtgtgctgttcagtatgctgatcggtgtcattttcggcatgctgcccgccaacaaagcatcacgcttagatccgattgaagcgttacggtatgaataatcggcgccccatgcagtctgcatggggttttttgtgttttaatgattgaatgaatataatagacttttttcatttatgataaaaagaaaatgtcatacaattgtccccctttttgtcgaatttacagtttacaaaccctatgtacatacgttaatatgaacaaatgtgaaagattttgatagttattgaatgaatttgagtgattttagttgctagaagtaaaaaaagcgtttacaattatcttgcagccgaaatgaatacgtttccaaaggaggcggaatatgctcactcctgaaaggtatcagctgattatggatcagattgaaaagcgtgatgtggtgaagattcaagagctgataagtatgacaaatgcttctgaatcaacgatcagaagagatttatcaacacttgaagagcgcggatttttaaagcgcgttcacggcggggcgtctaaactttccaacagcaggcaagaacccgatatgcttgaaaaatcctccaaaaaccttcaagataaactgaagatcgcagaagaagcggcatctttattagaagaaggtgactgtatttatcttgatgcgggaacaactacattgcacatgattgattttatagatccatctaaggacattgtggttgtcacaaacggagttatgcatatcgacgctttaataaggaaagggatccccttttatcttctcggaggatatgtgaagcatagaacaggtgcgatgatcggcggcgcctcattaacggcggtcagccagtaccgttttgacaaaagcttcctcggggtgaacggcgtgcacattgaagccggctttacaacacccgatccggatgaggctcttctgaagacaaaggctgtgagacaggcgaaaaatgcgtatgttttagccgatccttctaaattcggcgagatttctttcgcagcgttcgccgccttgagcgatgccgctatcattaccactgaagctgaagaacttgcattcgataattaccaagaaaaaactgtcgtaaaggtagtgaaaccatgatttacactgtaaccctcaatccgtctgttgactatatcgttcacgttgaagattttgccgtaggcggtttaaaccgttccagctatgacacgaagtatcccggcggaaaaggcatcaacgtttcgagattactgaaaagacaccatgtgccatcaaaagcattggggtttgtcggcggatttaccggaaattatatcacgtcatttttgcagcaggaaggtctggaaacggctttttctgaggtggatgaagacacgcgtataaatgtaaaactgaaaacgggcgatgaaacggaaattaacggacagggcccgacgatttcagacgaagtgttcaatgcctttttagaacagttctccgctctggaagagggagacatcgtcgttttagcgggaagcattccttcttccctgccgcataacacgtatgaaaaaattgctgaggcatgcagaaaacagaatgcccgggtagtcgtggacatctccggtgaagcgctgatgaaagcgacagaaatgaaaccgtttttgatgaagccgaatcatcatgagcttggggaaatgttcaatacggtcattgattcagccgaagctgccgttccttacggtaaaaaattgattgaacaaggcgctgaacatgcgattgtttcgatggctggtgacggtgcgcttttatttacgaaagaggcggttttcctcgccaatgttcctaaaggaaagcttgtcaattcggtaggcgcgggtgattccgtcgtcgcgggattccttgcgggaatttcaaaacagctgcctttggaagatgcgttccgtttaggagttgcttccggaagcgcaacggcattttctgaagaactcggaactgaagagtttgtacagcagcttcttcctgaagttaaagtcacacgtctatagaggaggaaagaaaagtgaagataactgagctgttaacaagagatacaattcatctcaatatagaaagcaaagagaaagaaaacgttatcaatgaaatggtgacagtgcttgacaaagccggcagattaaatgacagagaggcttacaaagcagccattttaaatcgtgaaagccaaagctcgacgggaatcggcgaaggcattgccattcctcatgcgaagacggcgagcgtcattaacccggccatcgcattcggccgttcaaaagatggtgtggattatgaatcattagacggtcagccggcacacctggtctttatgattgcggcaaccgaaggagcgaataatacgcaccttgaggcattatcaagactttcaacgcttctcatgcgtgaggaaatccgcaaacagcttcttgaagctgaatcagaagatgcgatcattgacatcatcaatcagcatgacaaagatgacgatgaggaagaagaagagcaggaagaacaggcagcgccgtcaggaaaaggcaaaatccttgccgttacggcatgtccgacaggtatcgcccatacgttcatggcagctgacgcactgaaggaaaaagcgaaagagctcggcgttgacattaaagtcgagacaaacggctcaagcggtatcaaacataagctgacggctcaagaaattgaagacgcgcctgcgatcatcgtggcggctgataaacaggttgaaatggaacgctttaaaggcaaacatgttcttcaagtgcctgtaacggccggtatcagacgtcctcaggaactgattgaaaaagccgttaaccaagatgcgccgatttacgagggcagcggcggaggatcttccgcttcaaatgaagacggcccgaaacagaaatcaggcacaagcatcggaagtactttctataaacacttaatgagcggtgtcagcaacatgctgccatttgtcgtcggcggcggaattctcgttgcgatttcattcttctggggaattcattcagctgatccgaaagacccgacatacaacacgtttgccgcagcgctgaactttatcggcggcgataatgcgttaaagctgattgttgcagttcttgccggattcatcgcaatgagtattgcggaccgtccgggatttgcgccgggtatggtcggcggatttatggctacgcaggcgaatgccggattcttgggcggactgattgccggattcttagcaggttatgtcgtagtccttttgaaaaagctgtttgtctttattcctcagactcttgacggattaaaacctgtattgatttatccgctgctcggtatttttatcaccggtgtcctgatgcaatttgtcataaacacacctgtcgcagcgttcatgaatttcttaacaaattggcttgaaagccttggaactggaaaccttgttttaatgggtattattttaggcggtatgatggctatcgacatgggcggcccgctcaataaagcggcgttcactttcggtatcgcgatgatcgatgccggaaactatgcgccgcatgcggccatcatggcgggcggaatggctccgccgcttggaatcgcactggcgacaacattctttaaacacaaattctctaaacgtgaccgtgaagccggtattacgtgctacttcatgggagcagctttcgttacagaaggcgccatcccgtttgcagcggctgatccgcttcgcgtcatccctgcagccgttgtcggttctgcggtagcgggcggactgacagagtttttccgggtaacgcttcctgcaccgcacggaggaatattcgttgcattcattacgaaccatccgctgctttacttaatgagcatcgtgatcggagcgattgtaacggcggttatcttgggaatcgtcaaaaaaccggttgcagagaaataagcaaaaagcgtccattacgggcgcttttttcaatcatgtgcgcatagaagcgttatgtattttatgatgagttatgataaagtaaagatggtacatgaaccgaaacagtgatcgtctaggaggaaccacgttgactgaagaacaaaaacctacttctgaaaaatcggtaaaaagaaaatccaacacatattgggaatggggaaaggccatcattatagcggttgcacttgcgctgttaatccgccatttcctgtttgaaccgtacttagtggaaggatcatcaatgtacccgacattacatgacggtgaaaggctgtttgtcaacaaaagcgtcaattatatcggagaaatcgagcggggagacatcgtcattattaacggcgatacgtcgaaagtccattatgtaaagcggctcatcggaaaacctggagaaacggtggaaatgaaaaatgacacgctttatataaacggcaaaaaaatcgcagaaccgtacctcgcgagcaataaaaaagaagcgaaaaaactgggagtcaacctgacgggagatttcggccccgtaaaggttccgaaaggcaaatacttcgtcatgggcgacaatcggctgaattcaatggacagccggaacggactcggtttaattgccgaaaaccgaatcgtcggcacctcgaagtttgtgttcttcccgtttcatgatatgcgtcagacaaaataaaaacgccgcgctgcccgatttggacagcaggcgttttttatttggcaaacgaggcggcgacggcgatgaacaataccgtggccagcactgatccgacaatggccagaacgctgaaaaaaagattcacctgcttcttctctttgccgcgtttttcaagcatccgttttgaaaagagatgcgaaaacgtataaatgagggcgattccgacgtacaagccgatgtcacgtgccgtaaagcctgtgacggccagaaaaaccccggtgaagaaaatcataagacagtattctgtgagtgttaaaagcttcaacttgttcctccgtgatgaatatgtatatatatctattgtatcacagcgctccgggtttgacgcctgcatctttcaaacccgtatattcgcagggaaacatttctcttcccctttattcatggtatacttttaatgatgatagacacgatggaggattctaaatgattgctgtaaataatgtgagcttgcgttttgcggatcgcaagttatttgaagatgtcaatattaaatttacgccgggcaactgctacggattaataggcgcaaacggtgccggaaaatcaacatttttgaaaattttatccggtgagctggagccgcagaccggcgatgtccatatgagcccgggcgaacgtcttgccattctgaagcagaaccactttgaatatgaagacttcgaagtgctgaaagtcgttattatgggacataaacgtttatacgaagtcatgcaggaaaaagacgcgatttatatgaagcctgatttttcagatgaagacggcatccgcgccgctgagcttgaaggagagtttgcggaattaaacggatgggaagctgaaagtgaagccgctattttgttaaagggcctgggcatctctgaagacctgcatacgaagaaaatggcggacttaggcggttcagaaaaggtgaaagtgcttttggcgcaggcgctgttcggcaagccggacgttctgttgcttgatgaaccgaccaaccacttggatctgaaagcgattcagtggctggaagagtttttaatcaactttgagaacacagtcatcgtcgtatcccatgaccgtcactttttaaataaagtgtgcacgcacatcgccgatcttgattttaataaaattcaagtgtacgtcggcaactatgatttctggtatgaatccagccagcttgctttaaagctttctcaggaagccaacaagaaaaaagaagagcagattaaacagcttcaggagttcgtggccagattcagcgccaacgcctctaaatcaaagcaggcgacatcaagaaagaaactccttgataaaatcacgcttgatgatatcaaaccgtcatcacgccgttatccttatgtcaatttcacgccggaacgtgagatcggaaatgacgtgctgcgggttgaaggcttaacaaaaacgattgacggggttaaggtgcttgataacgtcagctttattatgaacagagaagataaaatcgcttttacgggacgcaacgaacttgccgttacgacattgtttaaaatcatttccggggaaatggaagctgacagcggcacatttaaatggggcgtgaccacttctcaggcgtacttccctaaagacaacagcgaatattttgacggcagcgacgcgaaccttgttgactggctccgccaatactcgccgcatgaccaaagtgaaagctttctgcgcggtttcttaggacgcatgctgttctcgggagaagaagtcaacaaaaaatcaaacgtcctttccggaggagaaaaagtgcgctgcatgctttcaaaagcgatgctttccggcgcgaacattttaattctggatgaacctacaaaccacttagatttggaatccattacggcgcttaacaacggcttaatcagctttaaaggcgctatgctgttttcatctcatgaccatcagtttgtacagacaattgccaaccgcatcattgaattaacgcctaaaggcattgttgacaaacaaatgtcttatgacgaatttcttgaaaacgcggatgtacagaaaaaacttgaagagctatacgcgtaataaagaagcaggggagactctgcttttttatttatgaaaaaagttttcaatcttctgacttcccgttacaataaatgaatacataacttgaaaagagacggaggaatgcatcatgaagtttttagttgtcggagctggaggagtgggcggatatatcggcgcgcgtcttgcagaaaagggaaatgacgtgacgtttctcgtccgcaagaaacgggcggaacaattacaagagacgggattgaccgtcaaaagtgaaaaaggtgatgtttcaatcaagccgaaattaatcatggcgggcgaagaaggagcatttgacgcggttatcatcgcttcaaaagcgtattctttgcaggacgtcattcgggatgtcaaaccgtttgtcaaaccttcgtcggtcattattccttttttaaatggatacaggcactataaccagctgtttgaagctttttcaaaacggcaggtgctgggcggcctctgctttattgagagcgcccttaacgacaaaggggacattcttcatacgagcgctgcccaccgctttgttttcggtgaatggagcggggaacgcacggaacgtatgaatgagctggaaaacgcatttgcaggtgtgaaagcggatgtcatcatcagccgggatattgaaaaggacatttggaaaaaatatatgtttattgccgcgcaggcgggagtgaccactctgtttcaacagccggtcggaccgattttagaaacagaaggcggccgcaacacggcaaagcgcctctttgctgaaatcggcgccattttcaaggctgccggcatcccgaaagatcctggtctggaagaagagagttatcgcacattgacaagcatgtcttaccatatgaaatcgtcgatgctgagagatatggaaaagggcagggtgacggaaggtgatcatttacacggatttttgcttgagaaagcgaaaggcttgtcagttgatgcacctgttttggaaaccgtctgcgccaacttgcaaatgtatgaagcgaaataaaaaaaggaggcctaagcgcctcctttttttattaaaatgcccagtttccgtttctgaagatcggttctcttttgccgtccgcagtaatgccgtcgatattcatgtctttggaaccgaccataaaatctacgtgtgtaatgctttcatttaagccctctttgacaagctcttcccgtgtcatttgtttgccgccctcaatattaaaggcatacgcactgccgatcgccaagtggttagaggcgttttcatcgtacagtgtgttgtaaaataaaatatttgattgtgaaatcggtgaatcgtacggcactaaggccacttcaccgagatagtgtgagccttcatcggtttcgacgatgccttttaaaatctcctcgcctttttcagctttcacatcaacaatgcggccgttttcaaaggtaagagtgaagttatcaataatgttgccgccgtagctcagcggtttcgtgctggaaaccgtgccgttcaccccgtcacgctgcgggagggtgaaaacctcttctgtcggcatgttggccatgaattcgtgcccgctctcattcacgcttcccgcgcctgcccatacatgttttttcggcagttcaatggttaagtctgttccttcagcctgataatgcagggcgctgtaatgttttttgtttaagtgttccactttttcatgaaggttttgatcatgttttttccatgcttccacagggttttcttcatttacgcgggtcgttttgaaaatttcttcccataaaagctgaacggctgtttcttccggctgatccgggaacacttttttcgcccagcctgttgaagccgctccgatcaccgtccagctgaccttatctgattgaatatattgtctgtatgtatgcaatgcttttccggcggctttttggaacgctgcaatccgtttgccgtcagtgccttttaacaggtcggggtcggatgagacgacagaaataaacgcagccccttttttcgcgagctcttcttttccttttgcttcccattcaggatactcttcaaacgcttcaaaaggtgccatctcgtattttaatctggacagttcatcgtcctgccaatttacggtgacgtttttagcgcctttttcataagaatgtttggcaagcagtctgacaagttcccgaacatcagttgaggcattgattacgacgtgctgtcctttttggacattgacgccgacttctaccgccagctgagcatatgtatgtaacttttcagtaaacgaactcatcgttcattcctcctcatcggtttttctcatcatatcaaatatcgcctcataaaggaaagaaaggagcacaaacgaaaaagacacagcttttgctgcgtctttacgggtgattcagttttacggcgccgccggccggagaatggggcatattggccagtgatatgctcataccccccaaaataattccgcttaaaatgacggctactgctacgcgtcttcccacatctctaagcatatgcttcctccttaatgtttctccagttctcacaatatgagccggccggagaaaaaagaagcacaatcttattatttaatcgctttttgcagcttgtcgatgacgtctaatgaacgtcccgtgccgatagccactgattcaagcggatttgccgccaaatgaacgggaacgacgatttcatctgtcagccattctttcatcccgtttaaaagggagcctccgccggttaacacgacgccgcggtcaacgatatcaccgctgagctccggcggacaatcttcaagtgtcgctctgatcgcttcaagaatatgcaggagcgactcacgcatcgcgtgctgaatttcattagattgcagtctgattgtcttcggcagaccggttacaaggtcacgcccgcggatttccatcgtttccggcacatgttcgatcaatgcaaaaccgatttccattttcacttgttctgccgtacgttccccgatcagcaggttgtatttttttctgacgaacgaggcgatatcttcatcaagctggtcgccgccgattctgatcgaatggcaggatacgacgcccccgaatgagatgatggcgacttcagtcgtaccgccgccgatatctacgacgacgtttgcgaccggctcgtcaacagggaggtcggccccgattgcagcggctacgggttcttcaatcaagtgaacgtttttcgctccgcagtttttgacagcgtcactgatggcgcgtcgttcaacggctgttgagcctgaaggcgtgcagacgacgacattcggtttgcggaaagtcattccgattttttttccggcttttttcataatgtgttttaataagtcagttgtcatatcataatcagcaatgacaccgtctttcatcggccgaacggcgacgattttccccggcgtctttccgatcatgcttttggcatccgttccgatggcaagcaccgctttcgttgttgtatctacagcgacaacggaaggctcgtttaaaataattcctttatttttactgtaaacaagtatattagcggttcctaagtcgattccgatctcagttgattgaaacatgttttcacccaatccctatcctgatttaattgattctacatttaaagtttctgagaaaaaccatgatttttgggggtttccgccgggaatgaaatgtttttgtaaaaaaggagggaaagtctgtatcccatatttcaaaaggattttcttttgtaaaaaaacattcagttccggatgctgagaaacttttgctccgttcctttcgtctacgtttatgaaggattttccttggacataaagaagagacattaaaggaagtaggggatttctatgaaatcaattggtgtagtaagaaaagtagacgaactcgggcgtattgtcatgccgatcgaattgagaagagcattggatatcgctattaaagatagtattgaatttttcgttgacggagacaaaattgtcttgaaaaaatacaagccgcacggcatttgcttaatgacgggggaaattactcccgaaaatcaggagtacggcaacggcaaaattattttaagtcctgaaggagcgaaaatgctgcttgaggaaatcgaggaagcgttaaaagatagatcataatcagcaaaaagggcggagcatcattccgtccttttattatgaacttgtgcaaaaactcacgggaaaagtaagcgaacctgctcaattaattgggaatagttatcattttttagtcaataatgcagtcaacaatgttacaatatatgtagaaatgctagcggcaggtgggactatgggaaaatatcaagcgcgtatcatttccttaatcttggcaatgatttttattatgttttgggattatttattttatatgattgaacggaatccgattaactggcccgttgacatcacctttaccgccgtcacattaatcagcgtctggctgctggcttattatgtggataataaaaagcagctgctggcggagctgaaggacagcgagcagaaagcaaaggcgctttcagatgagaaaaaccggatcatggacaatctgcaggaaatcgtttttcagacggatgcacaagggaatattacatatttgaatcaggcctggacggcgattacgggccactccatcagcgaatgtatgggcacgatgtataatgattattttataaaagaaaaacatatcattgattatattatctcccaaatcaagcagcagtccccgtcaggaatgtttacggccaaatatattaaaagagacggctcgatcttttggggagaagtccattataagctgtattatgaccgcagacagaaatttgtcggaagcctggggacgatgtctgatatcagtgaacggaaaaaagcggtcgacgagcttctggaaacgaacgaacgccttgccatgcaatctcaaaagctggccattgccggggagcttgcggcaggaatcgcccatgaagtaagaaatcctttaacgtctgtcagcggctttctccagctgatgaaagcccagtatccggaaagaacggattattttgatatcattttttcggagattaaaaggattgatctcgtgctgggggagctgcttctgctcgccaagccgcagaccgtgacgtttaccgctcatcatctcaaccatattttacggcaggtggcgacgcttcttgacacgaacgcggtgctgtcgaacactgtaattgagaaggatttcaggcagactgagtcctgtatggtcaacggtgacgaaaaccagctgaaacaggtatttatcaatattattaaaaatgcgattgaagcgatgcctgacggcgggaatattcatatttatacaaaacgggatgaagaatacgcggtgatcagcatacaggatgaaggaaacggcatgtcgaaagaaaagcttgaaaacatcgggaaaccgtttttctcaacaaaagatcaaggaacgggtctcgggcttccgatttgtttacgaattctgaaggagcataatggtaaacttaacattaagagcaaaaatggagaaggcagtacgtttcaggtgattctgccgttagaagcggctgctgtccaaaaggaggaaaaataacttgcttctttttgtatacggtttgttacggaagcgtgaagaaaaccatgaactgctgaaaggcgctccgtgtgtgtgcgagcaggctgcgataaacggcgtgctgtacgaaacggataaaggtcagcctgcggcgtctttagcagaaacagcttttgtgtacggggaattgtatgaaacagatcatcagatgatccgtaagctggatgcgtattatgctgattttgatcgaaaagaggttgccgtgacgacggatgccgggaataaaaccgccttcgcatatgtcgtaaagcccgaccagtgtgcttcattcagccgtatcaaaagcggagactggaaagaataccgttttatgaaacgggaggatgacagtccggtttattatttcgcttacggctcctgtatggacaatgcccggtttaaacaggcgggggtcgaccacttttttgccgagccggtcggaggggcggttgttgaagggtattcgacgagattcacattaaggcgtcctgacggttccagagccgatcttgttgaagacgggggacgaactgaaggcgtgctgtacaagctcccgtttgaagcggcaacctatctgtacaaaagagaaggtgttgataaccacacataccgtcccgcgttcatagaagtgtgtgccggcggccgtgtatacagaggcgtcctgacgtttctcgttcttgataaagctgaggaaattgcgcctccgggtcactatcaggaagaaatcgaacgcggagcggatctgtatttatcgcccgccttttcagaaaagcttaaacgctatatgaactcattgccgaaaatgtgatactattcctattagagatattgtttaaaggagtactgttatgagaaaagagtttgccgttatcggtctcggacgcttcggcggaagtatttgcaaagcattaagtgaagaaggccttgaggtcatggcgatggatattgatgaagataaagtaaatgaatacgccaaaatcgcatcacacgcggtcatcggcgattcaaccgatgaatcggtgctgaaaaacttagggctgcgcaactttgaccacgtcattgtggcaatcggcgaaaatatacaggcgagcattttaacgacgctgatcttaaaggaactcggcgtgaacacgatcacggttaaagcgcagaacgattatcatgagaaagtgcttgcgaaaatcggggccgatcacatcgtccaccctgaacgtgacatggcaaaacgcatcgcccacaacatcgtatcaaataatgtgcttgattatttggagctgtccgacgaacacagcattgtggagatcgtggccaacagcaggcttgcgggcaacacactgcttgatctggacatccgggcgaagtacggcattaatatcgtggccatcaagagagaaaaagaagtgatcgtatctcccctggcgactgaaatgatccaaaaagaagatattctcatcgttatcggctctcttacggacatttcccgatttgaaaaaagagtgcttcacacaaagtgaaaagccgtccgtaaaaggacggtcttttattatgtcagaatagaaagacattatcgtgtaagcggtattttctgcaatttttattgactatgatcaggcgatccgatagcatattgtaccatatacagaaaaagaggaggcctcattttgaacaaagaaacactggctgaacggctgaatgcatcagccggcagacaaaaagccgataccgtcattaaaaacggaaaaatcatggatgtatttaaccaggaatggatttctgcagatatcgccattacgggcggagtgatcgtcgggctgggcgaatatgaaggggaagaagtcattgatgcagaaggtcaaatgatcgttccgggctttattgacggacatgttcatatcgagtcctctatggttactccgattgaatttgctaaagccgtcctcccacacggagtgactactgtcattactgatcctcacgaaattgcgaacgtttccggagcaaaaggcatttcttttatgatagagcaggcgaaaaaggcgccgctgaacatccgtttcatgcttccttcctgtgttcccgccgctagctttgaacgctcaggagccgtattaaaagccgaggatttaaagcctttttatcaggagaaagaggtgctcggacttgcggaagtaatggattatgtgtctgttgcggaaggtgaagaggatatgcttcagaaactgcttgatgccaagcgtcacggaaaacggatcgacgggcatttagccggactgtcttcagatatcatcaatatatacagaaccgcaatggtgtcaaatgatcatgaagtgacgacaaaagaagaagcgctggacagaatcagacggggaatgtatgtcatgctgcgcgaaggatcggtggcaaaaaatacgctcaatgtgctgccggcggtgaatgaaaaaaacgcgcggcgctttttcttttgcacggatgataagcatgtagatgatctgctttcagaaggaagtgtgaaccaccaagtcaaaatggcgataaaggcgggacttgatccattccttgcgtatcagctcgccagtttaaatgcggctgagtgctacggccttgaaacaaaaggggcggtagcgccgggttttgacgcagatctgctgtttatttcagatgtacgggaggctgccgtcacgaagaccatggtcgccggccggaccgttgccgagaacggacgcacggtttataaacagtctgccggttcctattcgccggaccaggcgctgttggatacagtgcggctgaaagcgccgctgactgaatcggattttcatataccgattcaagaaggcaagaaaatgtatgtaatcgaaatgataccgaatcatttggagacgagaaaaaaagaagtgcctgcaccgtctgctgacgcgttttgtcctgatacagaaaatgatttattaaaaatcgccgtcgcagagcggcacagcggcgaaaaaatgataggactcgggattgtacaagggttcgggttaaaagaaggcgccatcgccacaaccatttctcacgattcccataatatcatcgccgtcggtacaaacgatgccgatttggcaaaagcaatcaacaggctccgtgacaccggaggaggattaacagccgtgaaaaacggagaattgcttcattccgttccgcttccgatcgccgggcttttgtctgataagtcggcggaatgggtcaatgacagcttgggcgtgcttcatgaaaagcttcctctgctcggattcaccggtgatttcaatccgtttctcacattatcgtttttagcgcttccggtgattccggatattaaaatgacagcagccggtctgtttgatgtcaaagcctttcagcatattccgctgcaataaaaaaactgcactcgtaatgagtgcagttttttttttagacctccataatgatcggaaggatcatcgggcggcgttttgttttttcgtataggaacggagcaagcgtatcggtaatttcgtttttaatttcggaccactgcgttgttttccgatccattactttctccagatggttcgaaatcagctgctgcgcgtcattgatcaaatcaccggattctctcatgtatacaaaacctcttgagattaaatcaggccccgccgaaaccttaaagtcgtccatattgatgctgacaacaacgataacaaggccttcttctgaaagaatgcggcggtcgcggagcacgatattgccgatatcaccgattccgcttccgtcaatgtaaacggagccggacggaattttgcctgccacagcggcttcttcgcctttgagggccagcacttcgccattatccatgataaagcagttttcttcaggtatgccgcaatcagtcgcaagtttgacgtgcattttctgcattctgtactcaccgtgaatcggcataaagaacttcggtttgatcaggcggagcattaatttctgctcttcctgtccgccgtgtccggatgtatgaatgtcattcaatgaaccgtgaatgacttctgcgcccgcacggtacagctggttgatggtgcggcttacgctgattgtgtttccgggaatcggagaggaagaaaagacgaccgtatctccgggattaatggaaatctgccggtgcgtcccgttagcgatgcgtgataacgccgccatcggttcaccttggcttcccgtacataaaattgttactttattggcaggcaaacgattgatttcgttatgctcaataaacgtatttttaggacaggtaatgtagccgagattttgtccgatttcaatagccgattccatactgcgtccgaatacggcaacttttctgccttttaaaacggctgcttcaatcacctgctgaagacggtgtatattcgaagcgaatgtcgcaaatataattctgccgtccacttttcggaaaatatcgtgaatgctttcgcctacgcggcgttctgacatggtgaaatcaggaacctcactgtttgtactgtcagaaagcaggcacaaaacgccttctttcccgatttcagccatctttgtcaagtttgccggttcgcctaccggtgtgaaatcgaacttaaagtccccggtatgtacgatattgcccggcggtgttttgacgacgattccgtatgaatccggaatgctgtgtgtcgttctgaagaaggatacagacgtcttgcggaacttcacgatgtcgtcttcaccgatgatgtttaatttggtctgtcttaacagcccgtgctcttcaagtttattccgaagtaagccgatcgcgagtttaccgccgtaaacgggaatatttacttgtctgagcaggtacggaataccgccgatatggtcttcgtgaccgtgggtgataaacagacctttaattttatcttcattttttactaaatacgtgtaatcggggattacgtaatcaatgccgagaagttcatcttccgggaacttgattcccgcatcaatcagtacaatttcatcctgaaactgcaccccgtacgtattttttccgatctcgcccaatccgccgagggcgaaaacggcagtctggtcattttttacaaatttcattccgctcataactccaatactttaaaattttcgctctgcttctcatattctaaaaaagcaccgtccacaggctgaacaaattcaatgttgtatttctgatctttcagtttcgttctgacgtcccgttctgaaacgccctcaatgtaaagtgaatctgttttttcccgaacaggtacttcgtcagccttctcttgataaaataccttataaatcatccaaatctctccttaaatgccgtatgttagactcgcttattctattatattcgaaaacggattataaggaaagtctcgagcaaaaaagggactttcaaaaaccgaaagatcccttctacgcgatgacttttttccggagcattccgccccactgtcttctgagtttcttccgtaatcggcgcagcatcgtatacctcctttaaagccctttatagcagtagtatgcggaaaaaatgaatttgttttcgtgggtaaaactggaatttcatcaaggcggttttccggaagaaaaactttctgtatgatgatattgaaaaagacacgactgataaacgggaaaaaggagaaattgacatgaaaccaaaattgatcttttttgatattgacggcacgatctatgaccatgataaacatattcccgatagcgcaagaaacgccgtgaaggcgcttaaagaggctggccatcacgtttttatcgccagcggaaggtccccgtttatggtaaaaccgattctggaagagctggagattgaatcatttatttcatacaacggccagtatgtcgtttttgaaggtgtggtcatttataaaaatccgcttcctgaagatgcggttgcgcgtttattaaagcaggcggcagaaggggagcaccccgtcgtatttatggcggaagacacgatgaaaacgaccgtccccggacatccgcacgtctcggaaggaatcggcagtctgaaagcgccttatcccgaagttgatgaaactttttataaaggaaaagaaatttatcagctgcttttattctgccgcggacatgaagaaaaagcatatgccgcttttccggagtttgattatgtccgctggcatgaattgtcaacggatgtgcttccgaaaggcggttcaaaagcggaaggcattaaaagagtgcttgagcggcttccgtacggcgtaagtgacacttatgcattcggcgacggactaaatgatcttgagatgatccgttttgtcggcaccggggtggcgatgggaaatgcggttccggaattaaaagctgccgccgatttcgtcacaaagccggtggatgaagagggaatcagctgggccgtcaaagaactgggccttttgaaataaagaaaaccggcactttgggaagtgccggttatttttaacggtcaatggcaatggcgttttcaggttctttgaacggattttctttatcaatatggtcgtaaaacatcacgccgttcagatgatcgatttcgtgttgaaacacaatggccggaaaacctttgaggcggatgtcaatctgttctccttcaagcgtcaccgcctttacgcggatgcgggcgtagcgcggcacatagccgggaatgggttcgtctaccgacaggcagccttctccgctcgtcaagtagcttttttccactgagtggctgacgatcttagggttaaaaagagcatagctgtataaagtgcctttcgcatcttctgcatggacggcgatcatccgtttttttacgtctgtttggggagcggcaagaccgacgcccggacgaagcttgtatttctcggctaattcaggattttggctgtttttcacaaactcaatcatatcagcaagatgctgtttttcttcgtcagaagcgggaagctgaacctcttcagcgatctctctgagcgcgggatgtccgtcgcgtacaatattttccatagtaatcaagaaacttcactcctaaagcttaatatgtaaattatagcgaatttctttatcgcggcgcaacgaaacaattggccggccatagcaggccggccgatgttcatggtgtataatgtcagcagccgcagcctaaataagcggcaccgacgatgattaataagataaacaatacgacgattaatgcgaatgtgcggccgtatccgccgccgcagccgtaaccgtaaccgccgccataaccatatccgccgccgcaacaaccgccgccaaatccgccgccaaatccatatccgtacataaaaaaacctcctcttttaattacgctgaccctctgtcagcagggccggcgtctactataaactatgtaaaagccaaaaagatgtatggtcatccgccctgttttctcaattttttacgcaagtattctttgaaagcaccgtaagcgtctttacacggtcatgccaattacagctcagctattgtcaaaaagcgttcgggcttctatagtggaaattgtcaagattgggggattttaagtgaatatgattcaaaaaaaggtattagcaggaatcggagcgctcggcgccgcaagtatgctgcttgccggctgcgggggaaaagatccggttgaatcgcttcatgactcgatggaaaaagccgttcaagcggaaaaaccgtttcaaaaagagcagaaaacattagaaaaattggagaaaaaagagcataagctatacgacagcgcggttaaactgaatatggatgattaccagaaaattgtcacactgtctgatcaggctctgagcaatgcaaatcagcgaaaaaaacatctgaaagcagaaaaagacagtattgatgattcaaaaaaagcgtttgaatccgcaaaaaaaacttctcaagaaataaaggataagaaagtaaaagaaaaagccgggcatgctgtcgctttaatggagaaaaggtatgcatcttatgatcttttgtacaaaaagtacgaaaaagccatttcacttgataaggacctttataaactgattaaagataaaaagctcacattagcgcagctggaagagcaaatcagcaaagtaaactcagtttacgaaaaggtgcataaacaagcagatgagttcaatcaatttactaaagactacaacaaagagaaagaactattattccgcaaatagtatagtgaaggcatatcggcatgggctgatgaactgataacaaccgagttcagccgcctgtaaaaaggcggctgaagaattggtatatacgtgtgtttcccattgacaacaagtaaatcatggtatagtatttatttagggaaatattcacataaaaccaatcgttgtttcggcacgttggaatgtttttattatattgatatatataaaacagaatgaaaatgtgattttaattatcagaaaattctatctatttatatttacggcgatatgatatttgtacatgctttttgcttttaaacctttatccggcataaaggtttttttattttgcttcgtaatgcttattaagtaagagtgctgagagtaaacgacaattttaaaattgaagtggaaaacgttaatcaaaatcggaacgaaaagaaacggcagaaatacggaacaggaggaaaacaaaatgcttgcttacgtctttcccggacagggagcgcagtttaaaggaatgggcagagacttattcgatgaattcagtgagctcattaaaaaggcagatcatattttaggatactccataaaggatttatgcctttcagatgaaaaagagaggctgactgatacgaagtatacacagcctgcaatttatacagtgagcgcactgcaatatttaaagggtttaaaagaaggtcatacacgccctgatgctgttgcaggacatagtcttggtgaatatactgcgctttttgcggccggcgtttttaattttgaaacaggtctccggctggttgctaaaagaggcgagttaatgagtgaggcttccgagggcggaatggctgccgtgatcggactggatgagcatcacataaaaaaaatacttcaaaagtatgaattcggccaaatagatatcgccaattacaatacatcttcacaaattgtgatagcaggggctgcagaagagataaagcgggcagcctctttttttgaaaaagaaggggcgaaagcttatatcgtattgcaagtcggcggagcttttcattctcgtttcatggaaagtgcacagcgtgaatttgcggaatttatcgaggagtttcatttttctgaattgaatttcccagtcatttctaactatacggcaagaccttataaacaagaagatatcaaacggaatttaattgaacaaataacaaactcggtaaaatggactgaaagcatcaggtatctaatgggacaaggcgtaactgtgtttgaagagatcggtcctggaaacattctgactaaattaattcaaaccatacaaagagatgaggaaccgcttactatcagtgcgccggaagacagtctctttttttctgaagggaacaaggacaattcggaaagcgggaaagagcatagcctcttggccgaaaatatagagagcggtgcagcttcaccggtgtcccgattgggtgatcaatctttcaaagaagattacggtttgacatacgcgtatttggcaggtgcgatgcatagagggatttcttccgctgaaatgctgatccgcctcgggaagaaaggaatgctggggttctttggcacagcgggtttacctataagggaaattgaacaggcccttatttctattaagaagacactcaaaaatggccagccctacggaatgaatctgcgatttgagccggatcatcaagatagagaaaaggaattgatagatttatatatcaagcatgacgtacgagtaatagaagcgtcttcgtatttttccgtcagcgcaccattaatttattacaaagcgcatcagttgaagatagacaaaagcggcacggtcatacctcataatcggatcattgccaaagtttcacggccggaagttgcggccgcatttctgagtccgcctcctcaaagtatcgtaaagagaatgtgtcagcacggtatgctgacggaagagcaggcggagtggctcagccgtattccggcagcagacgatatcattattgaagcagattgcggaagtaatactgaacagggctcattgacagcgatgctgccgttttttgttaacctgcgggatgaaatgatggaaacacacaaatacgcaaggaagataagggtcggggctgcgggaggaatcggaactcccgagtctgccgcgtctgcttttttaatgggcgctgattttattatgacgggatccattaatcaatgtacagttgaagccgaaacaagcggttttgttaaagaaatgctgagtgagacaggaatatgcgatactgcttatgcgccttcggagactctgtttgagttcggaacaaaagttcaggtgctgaaaaagggcacgctgtttccggtcagggcaaataaattattccaaatctaccaacaatatgagtctttgagtgagatagatgaaaagacaaagattcagctcgaaaatgattattttaacaagacttttgatgaaatctacgaaagcttaatagaaaaacagccgaacctcgcccaaaaagctgagcgcaatcaaaaatataagatgctgttactatttaagtggtatttgcagagaggatgtctgcttgctttggaagggcaggaagaacaaaaggtgaatttccaagttcattgcggcccgtctttaggcgcttttaatcattgggtaaagggcacggatttggaatcatggagaaacagacatgtcgatgacattggtgaaaaattgatgaatgagaccgaaagtctgctaaggcacagattggatacgttatttctacactaaagaaggggcgggtggaggccaatggttcatttgaataaacagagtgcggatatcgcgataatcggggttgcttgcagattccccgatgcagatcattatcatgaattctgggaaaacataaatagcggcaaagattccatccgggaagtgccgattgaacggtgggatcccgatctttattattcagctgatatcagtataccgaacaaaacaatcagcaagtggggaggttttattcataaagctgaccatttcgaccataagttttttaatatctctccccgggaagcgaaaaacatggatcctgagcaaagaatccttttagaagaaacttggcggtgcatcgaagattcaggggtttctttgcaggatctccagtgtaaaaccacttctgtttttgcgggtattatgaattctgactaccggcagacaggtcatgctgaatcggaaatcgacagttatgcctgtttaggaagtttcgaagctatgctttccaaccggctttcatacacattcggtttgaccggaaaaagcatgtctgtaaatgccgcttgtgcatcatcgcttgttgctttacatgaagcggttaagtcattgcggacaaaagaaagcgattatgcaatcgcatcgggagtaaacttgaatttccaacccggaaaatatatttctttttccaaagccagaatgctgagtcctgacggcaaatgtaaaacctttgacgcagcggcgaacgggtacgttcccggagaaggggcaggcgttgtattgctgcagcgccttggtgatgcagtaaaagccggtcaccatatatacgggatcataaaagggacagctgttaatcatggcggtaaaacccgttccataaccgctcccagagcagaagcgcagtgccgggtcatctcagaagctttacacaacgctgctgtcgatgctgcgacggtttcttatgtagaagcacatggcacaggtacatctctgggcgatccgatagaaatagaagcattgacaaaagcgtatcggcaatatactgaggatactcaatattgcaggatcggaagtgtgaaaacaaatatcggtcatacagaagcagcggcgggaatggccggattgataaaagttctaatgatgatgaaacaccggagggtgccgaaaagcctgaatgtacatacggtaaacccaattatacagtttgaaaaaacaccgtttaggccggcgcttgattcaagtgattggaaggcggcagacggggctccgctcagggcgggaatcagctccttcggttttgggggtgtcaactctcacgtcatcatcgaagaatttatacatacaaaagacgaatctgacaggaaaggaagggtacccttccttttttccgctaaaagtgaagaaagcatgaaacaaatgatacatcattggagaacctttgctgacgattctgaggaattttgcaaaatatcaaatgaagtgatcagcagcacccttttaacggggaggacatcgtttgattacagggctggtttattggcaggcagcaaggaggaatttaaaaatcagcttaaagagggattgagttttcggaggaaacaagattctgaatgggcgcttgccatcggtgacttcaaatgggaaagttataaacaatttgccgttttgaaacgggtgttccctgatttagaaaagaacgtaaggccggtgctgaagggtataccaaaattgcacagttcatttaaaagaaaatggacacctgagaaaatccgcttgtattctttagttatcaatacggaaatcataaaaagtatcctggcatccggttttaagccaagcctcattacaggcgccggagacggatattacgtcgctcttgcagcagcggatatcatcaaaattgaaaaggccatttctgtaatcacaggcgctgaaaaaccttcgcatttatcctgtgagccgccttccatgccatttgtcaatccgtacacttcaaaaacgtacccgccggttcgattaaatgaagaatatgtaaggatgctgctgaacggtctgagcttcccggctgattttgcagaccgcctgtacgggaaaacacggctgcttcttgagcaccaatatacgtttaaagggtttttagaagagtgggataaagcgggaaagactcaggaaatcgagattttatcttatattgtgaatcgcacggcggataaaagaaacgcattgccggctgatgaggaagcggcgatcatggctatccttgcctctatgagaagactgtataagagatgggatttaacagattatgatggattctttaataatgattatgtactggaaatattaaatttactggatgaaggaatcttgtctaaagaactttttctgagcatgttattgaaaaagcaagacggaattaaacaggctgttgcttgtattaatgagcagccggcaggtttttatgataaaactcgttttccgttgatgacagaatacaatcaaatggatgccgtgtctcaggagatagctgaccatatgccgcttcacacggaagaaaagggaacggagccggatgtgaatatttctgatttttcagtttttcaattcggatcgctccctccatcagcaaaactaaacaaagcggctgcttttgaagcggacaaaccagccgatgaggctctatatcattcatttatgcaaatgtggctttcaggagaagagattgaatgggcgaaactaggtgattatcataaaagaaaagcaccgcttccgccttatccgtttgagcgctctcaattttctttaaaccctcagccggtaaaatcagacgcggctttttcagaaaagaagaatcaggcactttatacgccggtatggaaagaaaccgcacttgagaatgaagcgggcagccgacaagcctgtactattttgttgttctccgggaataaagactattttgaagagctgaaaaaaagagagaatacgtccgcatatcttattatgcccggtgagcgtttagagcagataagcgacagtgttttcacgatcaacaggcagcgtcccgaagattatcaaggtgtcattcgtctgttaaaggaaaaaggcgcagcgcccgatgcaattttgcatacgtggtctgaaaaacagcctgaactggaagaaacactcgaatcaggaatttattccgtgttttatctgactaaggctttaatcagcgagaaccttataaacaaagtaacgttcatttatacattcagcgcagatcaaaaagaaaaattgccgtattttgaaggtgtgaacggttttttaaaatcggtaaaacaagaatatccgcagctgcattgtaaggcggtttgctttgaacatgattctgcatccgtttcattttcagaaagggctgacattctttataaagaaataaacacagcgcctgatcggcatattcatatcacttacagaggctgcgtaagatatgcacggatgttagtgaagcagagagaaacaaacagaaagaccgttcaataccctgaaaaagataaagtatatttaattacaggaggattcggggggattggcagtaaagtcgctgaatattgcgcgaaaactgaaagatccaccattatcctatcagggcgatctgttttaaacgaagataagcagaaacatttagaatacctgaacagctttaaagccaaggtttattatatacaggcgaatatatccgataaagaagcggtaaaaaaaatgattgacggtattaccgatcagcatgcaggtcttcatggcgtcattcattgtgcaggcgttatcagagactcgctgctttttcgaaaaacaaagcatgaactttcagaggtgattgctccgaaagttcatggtgcattgaatcttgatcatgcaacgaggtcgctcgaattggattttttcgccgttttttcttcagtcgtctctattgcagggaacgaaggccaatgtgattatgcatatgcaaacggctttttagatcattttgccgaatatcgggaacagaaacggcaaaattctctgcgcagcggccgcacgctgacaatcaattggcctttatggcaagacatcggaatgggggcgaacctgtcaggtcaagggcggacgtctctttttcatggttccgggctcgaagaacttcctgctgaagacggaacgcaatggttttcgcggattgtaacttcgggtcagctgcataatattgcagtctgcggtgatcatgagcgctttgaacaatttatgcggcagagatttttgacggacgaaacagagacaggcagtgccattcctttggctcaaggcgatattttggatcagacagttttgtttttaaccaatatcatctcctctgagatcggtgcagaacgggaagagatcgatcaagatgtgcatctggctgaatatggaatggattcggttatgattcatcaatgcaacacaaagctggagcagtcactgggagcaatttcgaaaacgcttttatttgaatttcatacaatcagagatttagcagatcatcttgtaaaggaatatccggatcggctggggcgtttattttcacgggaggaaaaaggaaaacagattcagagcattacccccgccaggccggaacaaaacatcactgcacctgcggcggaggaaaaagaacatcttgacgggatagcggtaatcggtatcagcggccgttatcccggggctgaaaatatcgaagaattgtgggagcttctatcaaaagagagaaccgcaatcacagaaattccgaaagaacgatggaattatgagacctactatgatccagaccccgctaaagcgcatgaggggaaaatttattgcaaatggggcggatttttaaagaatgctgaatcatttgattctttgtttttccaaatatcgccgagagaagcagaagcgatggatcctcaggaacgaatatttctcgaaaccgtatggaaagcatttgaagattcgggatataccattgaagggttgagaaagcagaccgaaaaacatgtcggtgtatttgcgggagtgacgaccaattcttacaagctgctcggcgaaagaataccgacggacaaaaacgatgtacttccaaattcgttcccatggtctctcgcgaacagagtgtcttacacatttgactttacaggtcccagtgtccctgtagatacggcttgttcttcatccttaacggcaattcacatggcttgccaaagtttaacaaagggtgagtgctcggttgcggttgcgggaggagtaaatttgtatcttcatccttctgactatttataccgatgtcagatggggatgctttcaaaatcgggaaaatgcagaagttttggagaaggcggcgacggtttcgtgcccggggaaggtgtcggggctgttattcttaaaccgcttaaagatgccatacgtgataatgatactgtgtacgccgtcattaaaggaacggcaattaatcatggcggaaagacaaatggctatacggtgcctaatcctgccgcacaggcggatttaattcaaggagctcttaaagcggccggttggagcgccagaagtgtcagctttattgaagcccacggcacgggaacgccgctgggtgacccgattgaagtccgaggcctgaccaaggcgtttagagcttataccgaagatgtttcatattgctctctcggctcgattaaatctaacatcggccacctggaagcggccgcgggtattgccggcctgacaaagattatcttacaaatgaagtataaaaaaatagccgcaacactgcatgctgaacgggtgcatccggatctttatctggaagagacacctttttgcctccagcaggaaaccgccgactggataaaacccgcgaatgaaaaacattctgacagcaaatatccgcggcgtgcgggattaagttctttcggagcgggcggggcaaatgctcatatccttgtggaagagtatgagtctgctgctgactgtcatacgaggcgtgaggaaagtgaggaacttatcgtactctcagccaagcattcactgagtttacgggaatcagcaaaacagctggaggaatatcttcaaaaggcccgtcataagcagggcgagtttttacagcaagcgggaacaaacaagccgcttcacctttctgatattgcgtatacccttcttgaagggcgtgaagccatgccggaaaggcttgctgtcatttcaaataatatcgatgatctgatgttgaaattaaatcacttttataatggaattgacgatcacgaaatatttagagggaaaaaaccgaatcataaacgcggacagcggcaatcggatcttccgctcaaatccggcagcaccacattagccgaaatggctgaattttgggtatcagggggcaatttaagctgggatgacttccgcaccggcagaaaaccgagaaaaattgccctgccgacttaccctttcttaaaaaacagactgtgggtgtcgaataaggcgcaaacaacatcagctgataaagctcctttatttgatttttcagcaggtgagtgccgattttataaaacgcttttagattctgaatattatgtaaaagatcatgttgtgcatgggaatatggttctgcccggagcggcaatcatcgaagcggccagagaagcgggagagaggctgtacggaaaatcagtcataaaactgagtcaggttgtatgggcggttccgataaccgttgaaaaagaaaagacgataatgatagatctgctgccgaatcaaaaagacggcagatttgtggtgaaaaccgatatgcaacctgaagcggcagttcactgccaaggaaacattatcacatgcggagatcaagatgcctctcatacagagcattttcaattggacagctggttaaccggacagaaaagattaatcagcggcgctgagtgttacagggatttccggcagagcggtttggaatatggagccagctttcaggtaataaaacagctgtttatccatgaaaatgctgttcttgcacgaatatcacttcctgagagcattcataaaaaatccggcacgctgctggaaccgtgtttattggatggcatttttcaatccacaacagggtttacgttcggtcagcaagacgatcacaccgcatatttgccttttgaattaggtgagctggagattcttcaggcaccttcggcaaacggctatgcttacattacagctgccgatgaaagacaacatgatgatgtcaaaaggtttcatatactatttatggatgaaaacggatctgtaagtcttaaaataaaaaacttagcgttgaaggcattaagggctgcaccgcagactcaggatgagcggcattcagttaagtattacactgatatgtggaagcgggcccctctgcttcatcagcctgaagccagcggtttaaacagctgccttgtgatttcgctccgtcgggatatatcagaaccgctgatccgccaggcatataaagatatcggcctgaacatgatctttgtccgccatggcggcagttttcaagaaaaagaagctgattcctttgaattgaacagcgtcaaacttgacggctatcagaaattgctggcgattcttaaagaaagacaagtgacaattgaccgcgtcattttaatcgggatgagccctgaaacgggaattgagcagaacgttcgtgaaaagctggaagaggctgttttgccggttttcaatgtaacgaaagctctgttagcaacaatcccaagacataaaatcctgatatcacatgtatttttcacaagggaaaatcaaatcttaccttatcaaatggcaatcagcggcttttttaggtcgcttcatttagaacatccaatgttgtccggtaaaaatattgaaatacaaagcgacgaaattcagttacagctgaacacccgtctgcctgaattaaaaaaccttgtgaaagaaacaatcatcagcgatgatacttcagaaatcagatacagagatggaatcaggcaggtgaaacactctgcagaaattgaaagtgccgagccccccgaaaagatggaagtaaaagaagggggagtttacctcattacaggaggaacaggcggtctgggactgattttcgccagacatcttgtgcgaaaagggagaataaaacttgtccttatcggcaggtcagagctttctgaggaagccgtaagcaatgtaaaagagctcgaaaaaaacggatcagaggttttttatgtaagaaccgatatttctgataaggaaaatgtcaataacctgataaaactcgtcaaaaacaaattaggtcctgttaaaggaattattcacagcgccggtgtgataaaagattcattactcatcaataagcgtgaagaggatctcgattcagttttggccagcaaggtttacggaacaatatggcttgaccggtatacagacagagaaccgctggacttttttgttatgttttcatctatcagcgcaataatcgggaatgccggacaaactgattatgcttatgcaaaccggtttatggattattttgcggaaatgagagcggcggaaaataaacctggaaaaacagtctcgattaattggcctttatggaaagaaggcggtatgcaaattgatattcattcagagaagttcctttatgaccgtttcggaatgctgcctctgggaaaacgggaaggccttgcagcatttgatcaagcaatgacagggtgtgaacatcaaataatggtatttagcggtaatgaattaaagctggaacgaatgataacgattggcagcggaaaaagtgatccggcaatcgccgacgaaaatcacgaaccgaaagagctgtcaataactgaatctttaaaaagcactttgacgcgcatcatcaccggcgtattaaaaattgaagaacgggaatttgattttgaactgccgataagtgaatacggatttgattcaattatgtttacaatgctgggcaacgaattaaacgaaactttaggaatatcaatgatgccgtcagattttttcggtcttactgattttaatgaacttcttgagtttttaaagagtgagtattccgaggagcttcatctctgcggttctttttcttcagatgaatctgcggcgaaagaccggagagaaaatctgattgagggcatcgcaaagatgatgtcaagtattttgaagattaacagaaaggaaatagaagaagagacttcattcggcgagtacggatttgattctattacgtttaccagactcggaaatgaaatcaatcaacaatatggtacggaattattgccgtccattttctttgaatgcaattcactggatgaattgactgattatgtaatcgagcaatacggagaaatcctttttgctgagacagaatctttttctgcagctgacgaaaaaacattgtacagcatgcctccgccggaatcccatgaacattcccctgagtctgaaaacaaaaccaggcaagaggaaagacatatgaatgagccggttgcaatagtgggaataagcggccgtttcccccaaacagatacgctggaagacttttgggaaggaattgaaaaagggcgggatatgattacagacattcctgaagaccgttggaactggaaagagtttgacggcgatccgatcagggacgtcaatagaacaaaaataaaaaaaggcggatttatcaaaggcgcggacagttttgatccgttgtttttcgggatttctcccgccgaagcagaattaatggatccccagcaaagaatttttatggagactgtatggaaaacaatagaagatgcgggctataagccgtctgatttggcagggacgaaaaccgcggtgtttgcaggggtcgccacaacggattatgctgaacgtctgaatgaaaatggcgtctctgttcaggcgcagaccgcaaccggtttaaatcattgtatattggcaaatcgtatttcttaccagctgaacctgacgggtccgagcgaaccgattgacactgcctgttcaagttcgttagttgcactccatcgtgcggctgaggggattcaaagaggcgattttgaaatggcgattgcaggcggagtgcatattatgacaagccctactctgtttatagcttttgataaagcaggtatgctttccaaagacggaaagtgcaaaacgttcgataaaagcgctgacggctatgtaaggagtgaaggggcggctgcagtattgcttaagccgctcagcaaagcacaggcagacggtgatcatatatatggtttgattaaagggtcagctgtaaatcacggcggccgcgccaattctttgacagctccgaatccgaacgcacaggcggacttattaaccgaagcttggcggaaggcgggagtcagccctgccactgcgggatatatagaagcgcatggcacagggacaagtcttggcgatccgattgaagtaaacagcatcataaaggcatttaaaacgttatatcaagactgggacattccttttgcgaaacagaaatgctgcggaatcgggtctgtgaaaacaaacatcggccatctcgaaaccgctgccggaatagccggagtgatgaaagtgttactggcttttaaatatcgcaaacttccgggactcgcccatttttcagaactcaatccatacatcaaactggaaaatacgccatttttcatcacagaaaccgctcaaaagtggaatccgataaaagataaagagaacaacgatctgccgaggagagcgggtgtcagctcattcggattcggcggtgtgaacgcgcatattgttttagaggaatatagggaacctcaaaaagaagtgccggaaaacaacggtaacacacatatttttgttttatctgcgaaaaccaaagatcaattacttgagtatatccggcttatgcttcagtacttggatcgcgtgattgccggtgacatgaccgttaatgccagtgacatggaatttacattgcaaaacggccgggaagcaatgaacgaaagaattgccgtatgtgcagcgagtctgactgagctgagagataaatacgtcagctttcttgatgacagcaaggtgcaaaaaggcgtatttataagcgaaaacactgaagagcccacagctgtttctgaatatatgattgaggaggctcttcaaagcggaaaagaggagctgctcgcacaatggtgggccaatggagccgagtttgaatggaagacaatcggcaataagaaattgaatagagtgccgctgccaacttatccgtttgcaaaagagagttattggttcaccccgaaaaagaacaaaagtgaggttaaggttaatagcaaaagtcttcacccattaatcagcgagaatgtctcaacattaaagaaacaagcatttaaaactgttatttccggaactgaatttttcgtcactgatcatcttgtttcaggagactatgtgctgccgggagccgcttcgcttgaaatggctcttgtttgtgcggaaataagcggagaaagtaaagtatataaaataaaagacgtgatgtggaacagacctatattatataaaggaaaaacgctgcacatttataccgacttggaaatgaaacaagataagttgaacgtaacgatatgtaaagagggtccggatggcgtgcagcaaatctgcacacaaagtgaaacagtattcggagacataaacagaaatgctgagtatgtcgatattgataagttcaaacgcagcagtaaggctgtcataagccgggaagagtgttatcaccgcttcagtcgtatgggcctgacatatcatagcagttttcaaacgttgaaagccgtataccgcggtgatatggagttaatggcagaattggagcttccggctcatttagcgaacgggttttcacattttacacttcatccttcattaattgacggcggttttcaagcggcggcatttttgttaagagataatgagaaagacggcttatttgttccatattcacttagagagcttcatattaagagggcgcttactgcccgatgccatgtctcggtgagagaaaccggtttttatacgtataacattgattttattaacgagagcggcgaaatagccgtgagcatgaaagacttttctgtcagaaaagtgaccgggggagaattaaccgcaggacgtaaaaatgaagatcaggaaattctcttcttattagaacaattgaaaaacggtgaactttctgctgaccaagtttatcagctgctggagggaaaatagtgcagatcaaacaaatactttccttaattgaagaacagcaaatgtctcctgatgcaggactggagctaattcgcacttacagaaaagaacaaatggaaaaaaaggcggagccggaatcacaagctccgtccccaaccattttttttaagaacgattgggtaaggacaaataacattgatatgccgaatcagcaggcaccggggaatatgctgatttttgatcaggataaccgtctgtttcagcatgccgagatgatgaatggagatcataaccgtgtcattctcgtaacgcccgattctgattatagaattgaacggaatagatgcacaatcaatccttctgatgaaaatcatgtcgaaatgctgctgtctgatttggctgtaaacggatttacacctgatgtcgtgctttatttatggaacgaagaaatcagagaattcactgaagaatccgttaatgaaactcttcgcagagggatcaactcgctctttttattatcaaaagctttaatgcggagaaacgaacctgttacattattgcatatttattggacaagcggtctgaatcagccgtttcaggaagctgtcggagggttcatgaaaacggtaaacatggaaagctccaagcttcaagcgaaaaccatacagattcgccatgaggattctgacaaaaatcctccggtttccgagatgtgggatgctgcaatcagtgaaatacagcgctttcaaacggatgaatgtgagattttaatagactcacatacccgttatgtgaaagggctgcagcatattgataatccggaacacgataacggatctgtaacgtatcaaaaaggcggtatatatatcattaccggaggagcgggaaaactcgggctgctgtttgcggaacacatcgctaaagaaaaccaagccgtgattatacttacaggccgttcttttttaaccgctgatcaaaaagaacggatcagtaagcttaatgagagcggctctattgttgaatatcagcggacggacatcacagatcgaacagaggcagagcgattcattttcggcgttaaacagcggtacggcagcataaacgggatcattcatgctgccggcattcttcgtgactcatttcttgtaaataaaagtctcagtgattttacggacgtactgaaaccgaaagtttacgggacaatctggctggatgagctgacaaaagacgaagatcttgatttttttgttctcttttcttctttttccgcttatggaaatgccggccaaagtgactatgcgtacgcaaatcattttatggacagttttgcagtgcttcgatctcagctctcccgaaacggaaaaaccctttcaatcaattggccgttattgaaagatggcgggatgagtctcgacagcagtggaatcaaccaaataaaagaaaaatacggaatgactccgatgcgaacttcctctgttttggaagcgtttctaaaaatgctgcggtcttcatttaccagcttaatgcctgcagaaggaaagcgggataaaatgataaaagcgctttctattcaaagaaatacagctgcagcagatcaagatacactcacggcggaacacgatgaagaagaggaatatgctgcgaaagaaaaagtcaatgactatttaatcaagatcatcagcggtgtcttgaaaatccaagctcataaaataaatgcgaaggactcttttgagaaattcggaatcaactcacttatgatcatgtcacttatttcaaagcttgaagatactttcggggatcttccaaaaacaatcttttttgaatatcagaacattgaagagctttcaaacttcttcctaacatcttttaaagaaaaagtgcttaaggccgcaggggcagctccggtaacaagagtgccgaagaaaagagaaaatctgagtaaaaaacagcaccggcagcagagggttgcatctgcaccgagcatggttcagccgggtgaggatattgccattatcggtgtgagcggaagatatccgaattccgatactcttgaggagttctgggaaaacattgccggagggaaaaactgtattattgaaatccccgaggaacgttgggatttcagatcgaattacagtcctgacagaatggagaagggaaaaatcaacagtaagtggggcggttttatcagcggtgttgatcaattcgatccgctgtttttccacatttctcataaagaagctgagctgatggaccctcaggagcgaatttttctcgaaacctcctggcatacgtttgaagattcaggatatacaaaagagaagcttgacgggatgaaagccggtgtgtttgtcggagccatgtacggacaatatcaattattcggcgcagaagaaactgcgcggggaaatccgattgcgctcagttccttcttttcatctattgcgaacagggtttcatacttttttaatctctccggcccgagcattgcactggatacgatgtgttcatcatcgctgacggccattcacttggcatgtgagagcattaaaagaggggaaagtgaaattgcgcttgcgggcggcgttaatgtgtccatacatcccagcaaatacctttggctgagtcaaggtaattttgtttccaccgaaggattgtgcagaagtttcggagagggcggagacggctatgtcccgggagaaggttcgggcgccgtccttttgaaacctttggaaaaagcaattgctgatcaggatcatatatacggagtaattaaaggaacatctgtaaatcatggcggaaaaaccaatggatttacggttccgaatccgaatgcacaagctgagctgattgctgaaaatttcaagaaatcgggcatcagtccgcgttccgtcagctacttggaagcacacggaacgggtacctcgctcggagatccgattgagattgcaggattgacaaaagcttttgagaaatttacggacgataaacaattttgtgccataggttcagtgaagtctaatatcggacatctggagtctgccgcaggtatagcagcccttacaaaagttcttttacaatttaagcatcagaaattggcgccatccattcactcggaacagctgaaccaaaatatccgatttgaaaagacgcctttttacgttcagcagaacgaagaagagtggcggaaagaatcaggcgcctccaacaggagagcagcaatcagttcgttcggagcgggcggagcaaatgcccatgtcattgtggaagaatatcaaaaccatgcggacacacaaacaataagcggtccgtttgccgcagttctctctgccaaaaatgaagacaggctgaaagaatacgcccggcgccttctgcaattcacagagcgggagacaaaggtctcggcagctgatatcgcttttacattgcagacatgcagggaaccgatggaagacagacttgctgttgtagcttccgatttgccggaactaaaggagaaactgagaactttctgtactgaaggaacaattggggagggcgtatacaaagggaatgttacgaaagattttgataaagtctttatctttcatgatcaaaagatgaaagataaattcctcgaggtgatgatggagacaaaggacttgaatcttcttgcaaaattatggtctttcggggctgatattcaatggagagagttatatgaagaatataccccgcaaaaggtcaagcttcctttatatccatttgctgaggagtcttactgggtgcctggaagccaaagtgcagtatttccggaaatattgccgcagcagtcttcactgcacccgcttctggattcgaatgaatctactctggaacagcagttttttaaaacgacattaagagacaaagagatttggttaaaagaccacatcgtaaaaaacaagagcattctcccggcagctgcttttcttgaaatggcatgcgcagcgggaacgcggtcatatcgaaagaaaaaggtcactcgtttaaaaaacgtgatatttgccagaccggccatgcttttgcaagagagcctgaccatttacactcacatttccgtaaaagacggcagcatattatttaacatgtcacctgacgaggatgctgctgtaaggactggatttgtgacgggggaattagattatgatcatcattacagtgatgatgatatagagaacatcgacagacaagagatcataaacagaagtgcttttgtccgtgaacaagatgaatgttacgagtattttcgggaaaacgggttcctgtatgggcgcgcttttcagccgattcaacgtttatggggcggaaaaacggaagcggttgcacacttattgctgccaaaagaagccgcatatgctcttgaacattatacattgcatccgtctttaattgatggggctctgcaatctttgttcggcattacggacggaagagaagaggcatctgtttatgttcctttttcaataggagaggttacggttcggaaaaaggtttcagcagaatgctgggtttatgcgcgtaaaacaggccaaaaaggtcaatccgagcttatttacgatattcagctgcttaatgaacaaggagaaagacttgcaggtttgaaggatgtaaccattcgtaaaaaagaaacgttttccgcggaggcacagactcgtgcaacagcggattccaatggaaagaacgagagagtaaaagagctcctcagacaattaaaagcgggcgaactgactgcggaggaagcagattatgcgctggagcgtatgcaggattagtttatcattttgcggcagtgccatttgtaaaggggatgaagatttttatgaaagaagcccgtcatattagaaaaaaagtactttctgacatagaaagcggcatcatttctttggaagaaggagtaaagcggatacagcagcttggttctcattccgcagggggtagcggacaggcgatatattatcagacggtctggcagcggacagatctcagcattcatgtaaaaggcggccgacgtgagggcagccttttattatttcataaaaatgaagatgtgagtaaagaacttgctgcattgcatgatacaagggttatcttggttaagccggggaaagagtttcgaaaaaccggggacggtgtatttgaaatcgacccccgctctgaaagagattacataaacctgttaggatggcttatagaagaagagaagtcagatatacgggaagcggtgcatttgtggtcagacatgccgtttgaaaagacagagagagcgattcgtgaacaatgcgacagcggagtctattctttgtttttattacaacaggcgctcttcaaaaataactgccgcaaaccgatcaaactgttatatggatatttttcacatctttctggagaacagcctctttacgcggcggcaagcggatttttgcggacattgcagctggaaaatccgttaatctcagcaaaaagcattgagatagagcagtcaatagcagctgttcacgcagctgatatcatacgcaatgagctgagtgatttccagccttcagatgtagagattcgttataaagacatgcagcgttatgtcaaacagctcaaaacgtatgaacccgaaaaaaattcccgaagcggagatgtgccgctgagagaaaatggagtatatattatcgcaggaggcgcgggcggattaggatttacctttgcggaatatttggcttttcaaacaaaatgctgccttgttttaacggggagatctccgctttcagatcatataagaaaacagctgagacgattagaggatgccggttcttcagctctttatgttcaggctgatattaccaataaggaagaagccgaatatgtagtcaaaaaagccaaaacttcttatggaaaagtaaacggggtcattcagggcgcgggaatcatccgtgactctttccttcttaacaagtcacgagaggaattcgatcaggtaatcagaccgaaagtattgggtacgatgtggctgaatgatgctgttgagaaagaaaatcctgactttttcatttgcttctcctctacttccgcagtgttgggaaatgtcgggcaatctgattacgcgttcggaaacagttatatggatcatttcatgaatatgcgttctgcccaggattctgatacgatttctctctctctgaactggccgctgtggaaagaagtcggcatgcaagtggatgagcgcacggtagagacaatgaaaaaggcgggtttttatcctttagaaaaagaggaaggtaaagaagcgtttgcagtcgcattgtcctccggtttttcgcaatttactgtattttacggaaatgagcaaattgacaatcatgttcagcaattatatgaacgaaaagacaatattcaggcagatgaaggaacagggagaaatatcgaatcatttgattcagagaaactgacagctgaaacatctgatttcatcataaaagtgattgctgcagaattcaggatgcctgcggacaaaatagatgcagaagaggcattggaaaaatacggacttgattccgttatgattatcaatatgacgaatgagcttgaaaaacatttcggcgcgctctcaaaaacgctgttattcgaatatcagactgcggcagaattgtcacagtatttcgttgaggagcacagggatactcttcttcataaactccggttaggagaaaacgggagcagcaccccatcacagaagaaaaaagatcatgaacagacagccgatgttaacgggaaacagaaaatccagatgaaaaatcaggtgcagcaggagaagtatcatgacaatgatatcgcgattatcggtatcagcggacgttacccgatggcaaatgatcttgatactctgtgggaaaacttattgaacggtaaggactgtataactgagatacctaaggatcggtgggattcggggctgcactatcagcctgcggcgggcgacgaagtaaaaaaccaaagcaaatgggggggatttattgacgatgtgtatcattttgatccgttgttctttaatatttctcctgccgaagctgaattaattgatccgcaggagagactgtttttagagacggtttggcacaccatagaagatgcggggtacgcaaagaaaacgcttgaacgaaaaaacgtcggtgtttttgcaggggttatgtacggccaatatcagctgtacagcgttggtcacgaagcggccgtttcttcctcatatgcatcaatcgccaaccgggtatcgtacttttttaatttcagcgggccaagtattgctttggacacgatgtgttcctcatcattaacggctgttcattttgcctgtgaaagtttaatcaggaatgaatgtgaaattgcaattgcaggaggcgtcaatttatccattcatcctcataaatatgaactcctgactcaaggcggatttttatccagtgatggccggtgcagaagcttcggttcaggaggggacggctatgtgccgggagaagggacaggtgccgtgctgctgaaacctgtaaaaaaggctattgcggacggtgatcagatttattcagttattaaggcaacagccatcaaccacggtgctaagacgaatggatatactgtgccgaatcccaaagctcaaagtgaggtcattacgagagccttaaaaaaaggatttattgatccaaacagcatcagctatatagaagctcacggaacaggcaccgcgttaggagatccgattgaaatcaccggtctgaccagagcattttcaggtgccgaacgcgataagaaaacatgcgcgatcgggtcgattaaatcaaatatcggacatcttgaggctgctgcaggcatagcgggcattacgaaagttattcttcaaatgaaacataaaacgattgttccgtcactgactcattctgctgaattgaatgaaaatataccgtttcaaaaaacacctttttatgtaccggacagtgccgaaaaatgggagtcatccgttcccaggcgtgccggaatcagttctttcggggcaggaggagctaatgcccatgttattttagaagaatttgcggatgaagctatctctcctctcgcggctgaagaacctgaacagcttttatttgttttttctgcaaaaaatgccgacaggctggcagaatatgcaaaacgcgcaaaagaacatatagcagccagagattatccattagaaacacttagaaatacagcatttactttacaaaccggcagagaagaaatgccgcacagattggctgttatcgcctccacaagagatgaattgcttaaaagactgacagactatattctcggaaacgcgacggatcatatttttacaagcggcaaagacacaacagaagctcaaaggatgaacatagctgagattgaagaagcagccgcaaacagggatcttgtgaagattgctgaatactgggttggcggtaacggagtagattggccgtcactttataaagatgtcactttgagacggatttcagcacccggatatccatttgccaaagagctgtgcagaatagatgtgcaaaatatgggaagccgccggatgaacgttaataacgatctgcatccttacatttcatgcaatatatctgattttaaagcacagaagtttcttatcaatgtaagcgataccggtttgtatataaaaacaaagtatcaagacaaggaaatgtttccgtttctcagccagattgaaatggcgagagctgccggagcgatggcttcagggaatccgattattaaattaacagagctctcctttagagaaccgatgttacaaagcggaagcaatgagcagatccggattgtattaaccccggataatcagggtgcatcgtattctatagaaaaacagagcgactcatccatttattcctcagggcggctcgaattagaaggcggggcgtacgagaacggaaatgttcatcttgagccgtttctgtctcagcgcgcagaccgcataccgtacgaagcgttttatcagcggcttgccgaattcggatacagctgcagtgacagtctgaaagcggcagagtactgcgtcagcaggaacggacaggtacttttaaaaataaaagcaaaggccgggccgaaagggtgcataatcaaaccggaagttattgagagcgtatatcaagccgtcatataccttgcgggggaaaatgccggagagctcccggaaaacattaaggaatgtacgatttttgatcatgagactgaacccgtttatgtatatgcagaacaaactgaagaaagcgattcggcttatgatgtgtatgtattagacaatgccggcgggattttgatggagctgagcgggctggtttttggcgaaaagcctaataaaaatgtacgtttttatgagcataagtgggatcaaaaaaaccctctgattgaaatcaaagatagggagccaaaaacaattctggtctttgcaaaagatgaagcattagctgaagctctgaaaaatcaatcagacagccgtgtcattctcgtcacgccggatcagcggcagaccgatcaaaatctgctgacattctgtgtaaaaccggaagtgacttcagattacattcgtttattcgaagaattggagaaaaagggggttgctcctgatgtcatcttgcacacgggagaaacattttacgcgggtgaccgccttctcagcggcctggaatcaattttttatttattaaaagccctgagcgcccgcagtgacgcctctctttatcttcattctctgcttcttgttcactcttttaaagaaggcgtgaatgatccgtatacgggcgctcttgcaggctgtttaaaaacggcaaatatgttggtgccatccgcagagaatgtgaagtcaatcggtttttcagaacgtatatcaattgaaaaaatggctgaattttgtcttaacgaaatggtttcaggcgcggaacggcaggctgaagaagttaaatatattaatgacaagaggtatgttaagacattaaaagactatgtattcaatcatacagagcactctcatcagctgaaacaggaagggatttacctcataacgggcggtttgggcggtctgggcctgattttcgcaaaatatttggcctctcaatatcaagcaaaattagtattgacgggaaggtcaccgttaacagctgataaacgccataacattgaccggctgcaggcgcttggaggagatgcggtatattatcaagctgatgccgcagatcaaaagacgatgggacgggtcatagaagaaacgaaacggacttggggctccattcaaggcgttattcattcagctggtcatgccgatgatcggttatttacagagatgaatctggctgatttttcagatggcatgactgctaaaattgaaggcacggtatgtttagatgaattaacgaaagatgagccgcttgatttctttatcgtattttcttctatttcttcggtcttcggagattttggacaggttaactatgcgttgggcaattattttcaagatcaatatataaattggagatccgaacagagccgccggcaagagagacaaggcaagagcatttcgattaactggccgttgtggcgtaaaggcggaatgcatttaaacaaagaagctgaagaagcatatctttccgcatccgggtttgattatttggaaacggaagaagggatagcggcttttgagacgattttggcaagtgactgcccgcaaatttcggttgttaccggggatgccgaaacgacaccagcaagaaaagatctgccgcatcaaaaagtaaatacgcttccggttcgtcaagaggaaatttcttatacagcaccggcttatacagacaatgtcctggaagaactgaagcaaatggtatcggaattattgaaaattaacattgaacagctggatacggcagagaatttcggcaatctcggctttgattctatcagtttgaaaacattagctgtccgactgaataaaaaatacaaactaaagctgacacctgccgttttctttacttacagccatattaagtctctttcagaatttctgaacagtgaactgcgtactgttgcaaaagggaatacagatgcagaaaaaaacatttctgaaaaaaggaaagtagtgcacgctgggaaaaccacggggaaaaccgtgaagccgccgcgaagttttccgtttgaaaaaaagacaacaagacaggctgaccatcatccggagaagcagccagttgccattatcgggatgagttgtgtttttccgggagcaaaaaatgcagatgagttttggctcaatttaatcaatgaaaaagatttgatccaggaaattcccccggatcgctgggattggaaaaaatacgccgaaggcaaaggaagcaacgaagtatattcgaaatggggcggctttatcacagatgccgataaattcgatgaggcgtttttcaatattaatccgcgggaagcagaactcatggatcctcagcacagaatttatttgcaggaaacctggaaagcgatagaagatgcgggttacaaagcttcaaagctgtctggcaaaaatatcggggtgtttacgggcattcaatttaatgattaccgccagctgctgatgaggcattcggacggggcgcacgcgtttgcgggaaccggaaacagccaggcgctcatcagcaatcgtgtatcccactattttaatttcagaggtccgagtgagtccattgatacagcctgctcaagcagtcttgtagcaatccacagagctgtgcgctcgattcaaaatggtgaaagtgagctggcggtagcaggcggggtttcgctgcttttagatccagtcacgcatatgtatactgataaactcggtattttgtctagggacggccggtgtaagacgtttgataaacttgccgacggttatgtccgcggtgaaggtgcagctgttctgttattgaaaccattgcaagcggcaatgaatgacagagacaatatttacggagttctgagaggaaccggagcaaatcacggaggaagatctgcttcattgaccgctccgaacccggaagctcaggcagaactgttaacgtctgtttacaaaaatgccgatattcctgttgatacgatatcttacattgaagcacacggaaccgggacagaactgggagatccgattgagattgaaggcttgaaaaaagcgtttggatcttttgagccgcatccaggaaagaatcatgatcaatattgcggcatcggttcagtaaaaacgaatatcggtcatttagagcccgcctctggaatgccggggctgattaaagtattactatccatgaagtataaaacactgcctgccacacttcatgtcaaggaactgaacccttacattcaattaagcggaacaccgtttcatattgtcaataaaactatgaagtgggccagattaatagatcgaaaaggaaatgaaattccgcgccgtgccggagtcagttcctttggattcggcggggcaaatgctcatgtcatcgtggaagaatttgaatacggacaagataaagcagtaactggcgagcgggaacaaatcattgttctatcggccaaaacaaaggaaagactgatggttaaagccaaagagttaacaacgtttttacatgaagaactatcagttcaattcagtcagcaagaggtgcaggaacgtgatttgcaagaggcggttcgggaagcggcagcgggtatcctgcgtttagataccgcagatatagatgcaaagacacctctttcggaattcggatttgatccgttggcttattccgaattaatctcttttataaaccaaatgtacggcacagaaatatcacttgacatatttcaggaattaaagacactgagcgagctgtgccgctatatcagcagcatccggaatcgatcagctgataaaccgtataagggcaattttagagagaagtccggaatcagtcttgaagaaatagcatatacgctgcaaaccggaagggaaccatttgaatgccgccttgcgatcacttgctcgaatacaggagatcttcttgaaaaattaaacggttacatccaggggagcaggctgcaaggtgtttatgaaggaaatgtaacggattttgatagtctgtacgctcctttattcggcggccccgaaggtcatgcatatgtacaatcactgattcagcaaaacaagccggccaaactggctcagttgtggacgatcggttgtgaaatcagctgggaagacttgtatgaggaggaactcaaaccggttaaactgtctcttcctctctatcctttcagtaagaacagacattggattcatttaaataaagatgaagcgcagaaggctgaggctttctcgaacactgagcttcacaactcaaataaagatacagcagatggagaaatcatgtcgcttcttgaaaaagcacaaacaggtgagatgaatacgaaagagacgtcagagctgatagaggagttgcttttccatgaatgaaaaaacgatgcaaattgagcaaatcgtgaaaaaggtgaaagaatgcagcctgacgcctgaagaagggctggaattaattaagagcttggggacaacccatctatatgaaatggtatgggatagacatgaatttaaaggcagtaaaaaattcccgcatacgaaagagccaattttatttttttgcgaagacgacagcatgtataccgtaatgaagagacagcttgaaggttatgaggcgcctttcatttacgtgacttccggcgagcgtttcgaagattgccggaacggtcgttttacaatgaactttgcaaaaggtgaggattatgatgcgttatgcggggttctgcgttctcaaaatataagaccccgccatattattcattttttggctgccgggctcttcaaaaatacagaagatgcaatgagaaagcagctcaataaaagtctgtattccttgtttcaaatgtttcaggccttcatggcgaacaaactttgtccgaaagcagaaattttgtatctgtatgaaaatgccgagggcgaggttcagccgatttataacgcggttgaaagttttcttaagaccgtacaggccgaaaatccgaatttcacatgtaaggctgcagagctgaaatcaatgtttgacgagccgtttacaaagcagcatattgcagatgtcatctcttttgaatggaacaatcaatgtaagacggaccactttacctgttatgagccgaggcattattataaaaggcagcttcaaagagtaaaaaaagaagatggggagaaacatagtttcagtgtaaaaaagaacggtgtgtatttaattacgggaggagccggcggtctcgggtatctgtttgctgaatatctggcgaaacaggcagaagtcaagctgatattaaccgggcgttccccggcctcccgtgaaacggcgcaaaaattaagtgctcttgaaaatctcggcgctgaagccttatatgtcccggcagatatttcaaaggaaaaagagacggacgctttgattaagcacattaagcagacattcggagaattaaacggaattttgcacagtgccggacttgttaaggatgcatttatcataaaaaaaacgaaagaaagcatagaagaagttatagcgcctaaagtattcggaaccgtttggctggataaagcagctgaagaagagcctttagatttcttcgttatgttttcatccctttcggccgttctgcctaatgcgggtcaaagcgactacgccttcgctaacggatgtatggacggattcacccagtatcgaagcattaagggacgtcccgggaaaacactttctattaattggccgttatgggatgcgggcaatatgacagtcgggccgggagagctgcaggctttaagacatgcagggctggaacttttatccgcccaagcagggcttgccgcttttcaggacagtatgagccgctctgcttctcagctggctgttatcagcggagacaaagatagaataagtgaattactctcaactgaccataaaaagatagagactgtgcctgaaaacaacagtaatctgccgcaattacatgaaaaagatctgaaaaagcaaacggtccgtcttttgacagagatcgtcggagcggaaacgggaagaccggcggacagtattttacccgaggatacgtttgaccgttacggaattgattctctaacgattttaggtcttaactcccgtctggaaaagtattttggaagagtgtctaagactcttttctttgaatacagcagtgttgaagagctgtcagagtattttcttgaacactatcagcatgagttgcagaaggcgtttttaccggcagccgaacagcgaattgatcattcggcgccggcgaaacggcagaagctttccgtttcccgcataccatccgcaccttccgaggaagatattgcaattatcggtatagccggccgctacccgatggcgaaagatgtggaacagttttgggaaaatatttcttccggaaaagattgtataacggaaataccgaaagagcgctgggattttcggaaatattatcacacaggtgacaatgcccgtcatgacagcaaatggggaggttttataaaagacgctgataaattcgatccgctgttcttctcaatttcgcctcgtgatgccgagttaattgatcctcaggaacggttatttttagagacagcatggcacacgtttgaagatgcgggttacacaaagaaaaagttgaaacggcataagacaggtgtatttgtcggtgtcacctacagccactatcagttatttgcagccggtgcttcagatgatgaggaacgtcaggcgctcttgtcttcttattcgtctatcgcaaaccgggtgtcatatttctttgacctgcacggacccagccttgcaattgatacaatgtgttcttcttcactttctgctgttcattttgcatgtgaaagtttaaaaaggggagaatccaccctcgccatagccggaggcgtgaatttatctttacacccggataaatatactttactttcccaaaatcattttgtttcaagcgatgggcgctgcagaagctttggagcgggaggagatggatatgtgccgggagaaggagtcggggccgttcttttgaaatcgctttctgccgcgaaggctgacggggacaggatttacggtgtgattaagggaacatctgtaaatcacggcggaaaaacaaacggatacactgtgccaaatccgggcgagcaggcaaacgtcatcagtgaaactcttgataaggcggggattgatgcagacagcataagttatattgaagcgcatggcaccgggacatctttgggagacccgattgagatttcaggtttaaccaaagctttgcacagctcgaaaagcgattatcgttgtgcaattggttcggttaagtcaaatatcggacacctagaggctgcggcgggaattgcttctattacaaaagtgctgatgcaaatgaagtataaacagcttgctccttcccttcattccgataacttaaatcctaatattgattttgaggaaacaccgttttacgtgcagtctgaactgactgattgggagacgccgcaaaatcaagccagaaggtcaggcatcagttctttcggcgctggaggatctaatgcccacattatcatcgaagagtataagaatgaagaaaagatggaaacggtaaagagcaacaagacgcaaattattctgctttctgccaaaaatgaagaacggctcagactcttgattgatgcatatataaaagaattggagccaaaaacgtcactagctgatgctgcgtacacctcgcagaccgggagaaacgctatggaagagcggctcgctgttgaggttagcagcattgacgatcttcgcaataagctgacgatgtatttgcggtcagatcataagttaaacggtttatataggggaaaggcccgccgaggcgctggtcaaaagaatgccctgtcagccgcccactttaaaagtgcaagagaaatggccattcactgggtgaacggaggagacgttcaatgggaagagatgtacactgcggaattaccgaagcttgtctctcttcctgcatatccttttgaacggaacagatattgggtgcctgccgcaaaagctgcacagaaacagaaaaaaacaggtgcaccgcaaagtctgccacacgcaccgactgacttatcatttgatgtattaaaaaaatcgtggaaaaaacaaaaggctgcgccttccgcttttacgaaaggacaggtgatgatcctggctaatagtgaaagtgagcggcttgcattcgaattgtttgattcagatcctctgattgaatccgctgtcatttgcgcagataactgggatcattcggatggagaagccaaaaaaacggctctagcagtcatagaagaaaatccggaaatcatcggcatgattgacctgtcagatttgcggagtgatcaaaacggggcacgcaccggcacaatcgggaagctgacactgctgcaggaaatcataaagacacgtaaacagcttttcgttttacatgtgaccagagggctgcagacatttctgaatgacaagccgtcgttagccggagccgaaacagccggactatataaaatgctgagtgcggagtatcaaaagataaaatcaaaaacaatagatgtagacggtcatgtcgggactgcggcggaattgagacaggtaatcacagatgaagcttacgctgacgggctgtatagtgaaatctgctaccggaacggtgaacgttatattccatacgtcgaaaaattacatgcagcggaaataaaccggaaactatccggtctgccagtatgccgtacggatcaaaccctgattattacagggggaacaagagggatcggagcagaacttgccagacattatgccggcaagggagtcaaaaaacttgtgttgatgggagtaaccgaccttccggaatctgataaaatagccggcatgttaaaagacaccgatgaaaagtcacctctttattcgaaattacaactgctgcatgagttggatcaaaagggagttcaggtggaagtgtattccgggccgctcacggaaaaagaaacattacatcgcttcttttcagaggtgagactgaagttcggcaaaatcggcggggtcattcattgcgctggtgcagccaatcattcgaatccggcttttattcataaatctgatcaagaaataagagaagtatttgagccaaaggtgcaggggatgcaggtacttcatgacatttttattgatgacaaacttgatttcttcattttgttttcatctgttgcgagcgcctttcctttattaggcgccggaacaagtgactatgccgcggcgaacgcttttatggattactttgcggcgtatcagcatgcagccggcagaacatattatcaatcaattaactggccgagctggaaggacattgggatgggcgaggtgacaagtccatcatatcaggcacttggtttactttcacattcaacagaaacaggtattgccatgctggatgaaatgatgacgataaacggatacccatgccttataccggcaaagacacatccggagaagttcatgctgcagcagctgctccagacaagaattcaagctgctaaaaataacccggatgctgaggaaaaagtgatttctggtcagagagacaatgaagctataatcaggaagttaatggagattttttccgcggagctgaaaataccttacgggaatttagatcaggatacgtcttttgcggattacggagttgattcaatcttactggttcagcttgtcaaaaaagcggaagctgcatttcaaataaaaattgaaccatcagcttttctggagtatccgagtttttcacaactgggcgtctatttaaacgaattatttgcaagtgaggggatcagtcctcaaattgattcagaaaacattgaggttcggaaaaaagagcaacatataaatcaaaatgcttccgaagtacgggacagcggatctcaaatacaacaaaccagtctgaaccaaatcgctattatcggaatgggctgtgagtttccggatgctccggacacagaaacgttctggacaaacttgaagaaaagacaaaatagtgtccgcgaagtcccggcgtcgcgatgggatatttcttcatactactctgacacctatgaaaagggaaaaagtatcagtaagtggggcggatttcttcaagatattgagtctttcgatcccgcgttttttaatatgaacaaaagtgaggcatcagagcttgatccgttaatcaaaaaatgccttgaggtcagcgtccagacattgagagacggcggctatacaaaagaagaagtatcaaacaaagaagtcggcgtcttcatcggttcgcggaccgggacgtttatgtccaaaataggttccccttcaaaaaatacgatcgtgggtataggacaaaatttcataggcgcgcatatctcacacttttttaatctgaaaggaccgaatctggttgtagacacggcttgttcttcttcattggtcagcgtccatctcgcttgtcaaagcctgatgtcaaaagagtcagatatggcgattgcgggcggagttgacattttgctggatcaaaagccttacgtcatgctgagtgaggctcgggcgctttcacctgaaggaaaatgtcatacatttgatgagaaggcagatggctttgtaccgggagagggatgcggcgcagtccttttgaaaagacttgatgacgcccttgccgaaggtgacagaatttacgcggtaattgactcatccgcggttaataatgacggacagacaatgggaatgacaacacctaatccgaaagcgcaaagcgcagtgataaaaaaagccctgaaaaaaggcggaattgatgcagatactctcagttatgtcgagacgcatggcaccggtacgatgataggagatccgattgaattaaaagcgctgacagaagtgttccgggaggttacggaagaaaggcaattttgcggagtaggcagcgtaaaaacgaatttcggacatttaatgagcgcagcggggatagcgagtattataaaggttgccttatccataaaaaatcagatgctcccgccgacattacattgtaaaacgccaaatccgcgttttaaatttgatcagtcgccattctttccgaacacgtctttaaaagaatggcgtcccagaaaaggggttttgagagccggaatcagttcttttggattcgggggcacgaacgcacatatgatattgagcgacagccatctcacattaggatatggagagacaaaaagacacccgctttctccggttatattcaataaggaacaatgctggatcgacaatggagaaactccagaaaaggaagagtcagaattgctgattcctttacttgatttcaaagaattataaagaaaagaaaaggaatgagacaggtggccagtaatcaaaactatcagttcacattaacaattaaacatacggactatattgtcagggatcaccgggtgcatggcacccggattatacccggtgtcacatttttagatatgatataccgtatggcgatgagcaaaggtttgcctattgaagaacttgagtgccagaatattttgtatttggaacctgtagcaacatcggatacctttgacagagaaatccgcatccgttttcagggattggaacagggatgggaaattcaggcgaagagcagaaaggtaaaagatgaccgcatcctggatgaaagctgggatgagaatatgacctgcaggctcatgcagaaattcccggaaagcatgaggtcaattcatatcgatgaaatcaaacatgcctccgtccgtgaagccgatatggagatatgttatgactatttaaaaaaggttgatatagagcattttgaatttatgaagagtctggggaaggtttatgcgtctgatcattctgtacttgcagagttgtcgctcagccaaattgccaatcaatataccggctattttcaattgcatcccacttttcttgatgcgtctaccatcatatcgatcctttatcaggcatgtcccgaatattttacacaaggatctccggcaagccggatgaagacgtatattcccatccatattgaatctttccgtatggcgaagcgcctggaagacaggtgttatgtgtacatagagaagcaagaccaaaatcatgattcaggggatgtcatccaagtaagttacggtttgtacgatgcatacggggaggtgatcgcttattttacgcggctgtctgtgaaacatattcgctcaaaagatttaattgaaaatctgaagcagactcgtttggaaactgaagcggcttctcagccaaaagacagcctgatcagaaaagattcaatcataaatcgaagcgaaagcattgagacacaccttaaagaattaatatccggggtttcaaatatagatctgcgtgacataaggacagacattggtttttatgaacagggcctggattcagcttctttgcttgccattgtcaaagaacttgaaaacaaaacaggggaacagctgtatcctacactcctgtttgaacagaaaacgatccgggaactcgccgcgtatattaaagaaaatcaaagaatgtccagttatttcttaacgcgaaatcaaccggctgaaaagcctgacatgatagaaagtaagaacgaaaatctttccgctcttataacagaaggagacattcagcagctgattgcagatatcaaagggactgcccctgaaacactctctgtggtaaaaggtttttatgaacaaggcctcgattccgtaacacttatgcaagccgtaaaggcattggaagagaaaacaggcagggaactgtaccctactttattgtttgagtatccgacgattcaaaaacttgcaaactattttgcagagagcggcgaaaaaacttccgttgaaaaagacctccctcttcatcatggagagaatcatacggctttgacctatttaacgccgcattggagacaaaaggctgcggcttgggacccgaattgcggaaataaaaagaaaagaacatgcctgctgtttcaatatgacagagagctttttcattttatgcgggaaaatgctgaaaatggattcgaaaatacacagatcattctcgttttatcagggaatcgtttctcctatcacggagacggtgtttatgagatagatcacagggaggaagctcactttgacaggcttgcagctgatctgaaaaaaagggggcaaatgcccgacaccgtggtttacgggtggccggaagggtcatttgccggcccggaaaaaataagtgaacagctttctaagggggcttacccgctattctttttcagccgggcattgatgcgcagcaagacggaaaaaaaggttgtatcgcttttcctttatccggcggattataaaaatgatcagccgctttacgcttcagtccatggcgcagggcagtctattgtgcttgagaacccgaaactggcccttaagacaatcgggatatcagtttcagacaagtcatcgttgacggaacttacagctgaaatcatcagagtcgaatctacggaagctcatccgggagaaaccgatctttattatgaaggaaatgtgcgctgggtccgtgccttacgggaagcggaaccggctccaaactcagatttctcctttaaagaaaacggagtatacatgattacaggaggggccggcggcttaggccttatatttgctgaacatatcgcagcccaaacgaaagccaatattattttagcgggccgttctgaacttacggaagacaaaaagaacaaaatcagccgaatgaaagcaggcggttcttcggttcaatatataagaggtgatttttcagatagccgtgatgcagagcgaatcataaaaaccattaaaaggcaattcggagaaatcaacggtgtgatacacagtgccggtgtgacgcacgacgctttattgattcaaaaatcaaaagatgaaattcaggaagtaatcgctccgaaaataaatgggacggtcttattggacagcttgctgcaaaccgaacctttggacttctttgtgatgttttcatcaagcacctcgatgtacgggaatatcggacagacggattacgcattggccaaccggttcatcgatcttttcgctgagtggcgtgaaggaatgaggcggaaaaaagaacgctccggcgtctcagtagccatcggctggccgctatgggaagacggcggcatgaaagtggataaacaaactgaaaaatggatgaaacaaaaaatcggtatggttcctcttagtaaaaccaatgggatcaaagcttttcaagattcactctctctgaacgcatcacagctgatcgtgtttgaaggtgacaaagaaaaattggaatctgcacttcaagataccttcatagaggatgaaaactgcgagatccaaataaatgagaaagctgatacaaggcatgaggacattgccattatcggattaagcggaaagtatccgatggctgaagacttacctgaattttgggagaatttaaagagcggaaaagattgtattacagaaatcccgcctgaccgctggaatatggatgatttcttcagcgaagacagagatatgaaagggaagtcttacagcaagtggggaggttttatcagcggagccgatcaatttgatccgcttttctttcatatttccccaagggaagcagaacttatggatccccaggaaaggctctttttagaaacggccaaacattgttttgaagactcagggtacccgagaaacatgctggaaaagatgaaagtcggtgtatttgtcggtgcaatgtggggccaatatcaactatttgaaggagaagaaaatggagtggctttctcgccggcgtccgtctattcttcaattgccaatcgggtgtcttattattttcatttaaaaggtccgagtttggctctggatacaatgtgctcttcatcactgacctctattcattacgcatgccaaagcatacattgcggagagagcgatatggcattagccggcggagtgaatttgtcaatacatccgaataaatataagttcctcagcatgggacagtttctatcaagtgacggcagatgccggagttttggaaaagacggaagcggttatgttcccggtgagggagtcggggccgtattgttaaaaccattgaaaaaagcaatagaagatcaagatcaaatatacggtgtgattaagggaagcgccgttaaccatggaggaaagacgagcggatattccataccgaatccggatgcgcaggcggaggtcatttcagaagcgcttcgtaaagctgacattgatccgaataccgtcaattatattgaagcacatggaacagggacgtcattaggcgatccgattgaaattcaaggactgaaagattcctatcaattgaaccatccttgcgccatcggttcggtgaaatcaaatatcggacatttagaatctgcggcaggaatcgctgcggtaacgaaagtgcttctccaaatgaagaataagcagcttgttccttctctgcattccgatattgttaatccgtttatagattttgatcaggttccttttcaagtgcagcggaaagcggctgaatggaatattccgcaaaacagcaatgctgttcatcctttgagagccggggtaagcgcttttggggcaggaggaacaaacgcgcatcttatattggaagcgtatgagccgccaaaagcttttgatcatcaaagcggccgagtgatctttgttttatcggctcaagacaaacaacggctgataaaatatgcggaggttatggctgattttctatcagaaaatgaatcgaaggataacaatgataaactgcgtcttcaggatattgcctatacacttcagacgggacgcgatcatatggaagaacggctggcgatagtggcagattccgggcgggtcattgctgaagagctctcagcttatatcaggggtgaaaaaagcagcttgagctataccggtaatacattcgaatcagaagttcacaatgaaatgcctcacgtttgttcagattacgccgaagcagcatccaaatgggtaaatggaagaaagatagattgggagacttttgaggtgaatcggaatgctcgcaggatttctattccgggacaaccgctgatcaaacagcggtattggatagcggaaaaaggggaagcacttgtttcagcggatatgagtaagccgggtcaccctttcttggggagtaacacgtccgattttaatcagttcagtttcacgaaaaaaatcacccgtaatcatccgttcgcactaagtctgtctgaaggaaacgtgtcctttttcccttatgcatctttggctgaaatggctatcgtcaatgcagcggcggcatttggacaaccagttcatacattgactgatttattgtggaccgaaagcatgaacggaataactgatatacgggaactgatgattacgctgacgcctgagcgcgactttgcgcggtttgacatatatgcaaacacaaaagatgagaataaagtacgtcttgccaggggaaatgcgcatattgttaagcctgaaagcggtatgcttcctgaagcgcttgatattgctgaagtcaaatcaaaaatgactgaacatccggctgaagcgccttttgtcattgaatcagcgaaaaacagtgacggaatgctggcgcttcattcattgccggatgagctttatgcaaaaagagagaattttacgatctctcctgaagcgcttgagtccgcgatttttgccagtgcgttttttgtcagcggagaaaccttcccggaattgatcggaatgggagcggcggatgtctatcaccctctcgctcaaaatttttatgtctatactcaaaaagagaaccggcagaacagctgtgatgtaacgtgtcatatgacgtttacagatgaaaacggaagcattctggcagagtgcagagatgtgagattcagatatggtcatgaaaaagacactgttcagacggacgacgaactcattcgtctcctgcgtcaattggaaaccaatgatattgatcagaaggctgtattgaaacaattaatgggggaagaatgatgaacggaaaacgtgaacaactcagcgatattcttgatctgattcaaacaggacaaatgtcggctgacgaaggctatgcccgtgtgacatccattcagaatcaaaaatcacgggcatcgaaccatccgcttttatattacaagccggaatggacagaatcgttcattccgagtaagaagagcgtacccttgacgggattgctcctgatttttgcagaaaatgaacggcaaatacaagaattgagcggtttgtttaaggactgtactctcttgtttgttatccgcggaaaagaatttgctgttttacatgatgatacgatttgtatgaaccacgtgaaaaaagacgattatctaaagctgttccgatacattcatgatcattatcagctgcccgaaaagattcttcacttgtggtctgattctcaggctgacatgagtaaggaaggtatacagaaacaattggaaaacggattgttttctcttctgtatattacacaggcgctgattgaactaaaatggaaaaagataataaagctgacgcatatttttcaaacagagaataaagaacaactgccgctgcatcatgctctcggcggattggtgaaaaccgttcaccaggaacaccccaattttcactatcagattatcaatattacgcaatcagagggtgcgggagccgctcttccagcaatagcggatatatatcagagagagtgtgacgaaaaacgggatatccattttgaagtgcgctatgaaaacgggagacgttttacgaaaagctataataaagccggctcattcgatttaacccagccgctgaaacatcatgggaactatctgattacaggaggcctgggcggtctcggttatattctggcaaaacatctgtcggaacaatggaaagcgaatctcatattgacagggcgctctgatttaactgaagagcaggagaaaaagatcgaatatttaagaagttcaggttcaacagttgaatatatccgatctgatgtttcaaaacaaagtgatgctgaacggatgtttgcttttgcaaaagagcagttcggcaccttacatggagtatttcacagtgccggcgtactccgtgactcttttatcttaagaaagacaaaagaagaaattgatcaagtcacaggttcgaaagtttatggcacgctgtggctggcggaagaaatcaaaaaaatgaaagttgaattacttgtcttgttttcatccacatcggcagtcttcggctcagccggccaatgtgactatgctttcgccaatgcctgtttggatcagtatgcagcagttatgaccgcaaaagagtctgccggaagggtagtgtcagtcaattggccgctatggacttccggcgggatgaatattgacgatgaaggaatatcctacatgaaacaggaactcggtcttgacccgttagatgacggtgacggaatacaggctctggagaacagcttgtgtcaatcatctgaacagctgattgccctgaaaggccgtaaagaaaagattgaggatgtgctgaagcgtgccggcacaatcagcttacattcagaccagcaggaagatgccgatttgcaaaacgatgaattaagacaaaatatcatcagttatctgaaaaatataatgtcagaggaattgaaattaccggcctcactcatagatgaaaaacaatatctggagaaatacggcattgattcagtgatgatcatgcgtctgaccaaaaagctggagcaaagtatcggcagattgtcgaaaacattattttttgaatatcattcaatatcgcagttagctgaatatttcctgagtcatcacagcgaacgaatgatgaaactgctgaaaccggccggcacatctgaacttgtttcatatcaaaaaaagccaaaaagaaaaccagtggaaacaaaagcgccggtacgctctgaaggagaagattcaaaagagcacatggcggccgatcccctttctgctgatatagccattatcggtgtcagcggcaggtatccgggtgcggaaaacatcagggagttccagaatgtgctgatgaatggacgggattgcgtaagcgaaattcctgatgaccggaaagaaatgctggagggaagctgctataagtggggaggttttctgaaaaatccagaccggtttgatcctttatttttccggatatcaccgaaagaagcggcttttcttgatcctcaggaacgtctctttttagagacagtgtacaataccatagaggatgcgggttataaaccttcagatctgacccgcaaaaaggtcggagtatttgcaggcgtcacatatggaagctatcaatttttcggcgttgaagaatcacttaaaggaaatgaactggccgtcgggtctccattttctgcaatagcaaacagaatatcatatttctttaactttaagggcccgagtatggcggttgatacaatgtgttcatcctctcttaacgccattcacttagcctgtgaaagtatacgaagaggagaaagcacacttgctgttgcgggcggggtcaatcttacgcttcatccgaataaatatacattattaaatcaaagccgcttctttgcaagtgatggccgatgccggacattcggcgagggcggtgacggttatgtaccgggagaaggagtgggatccgtacttttaaagccggcggcggaagcggtaagggacggagatcatatttatgcgctgattaaagcgacagcggtcaatcacggagggagaacaaacggttttacggttcctaatccaaatggtcagtctgaactgatacaggacgcgcttcagaaagcttgtattgatcctcgtacaattagttatattgaagctcacggaacgggaacttctcttggagacccgattgagatcaccgggttaacaaaagcgtttcgggaatttacggagcacactcaatattgttccatcggttctgtcaaatcaaatatcggccatcttgaggccgcagcgggaattgccggtttgacaaaggttcttttgcaaatgaaactgaaaaaactgtttccttccatacatgcggagacgttgaatccaaatattgattttaaagcctctcccttttatgtacagcggtcattgcaagattggaagaaaccgaaactgcaggaaaacggaaaaacagtaactgttccgagaagagcggggatcagctcattcggagcgggaggaacgaatgttcatatcattatagaagaatatgaagaaacaaacgtctcaacagaacatgttgagaacgaaccgcattttgtcctgttatctgccaaagacaatgaacgtcttcttgagtatgccgaaaacatgagagattttatccagcgttcactaagtcctgaagtaaaggataagcagcctgatatgagagaaaaggtgtatgaagtactcaaaccgtttgtttcggaattgcttcatatccatccggaagaaattaatattgctgatcacctgagtgaatttggcgtagggcctttggaattaagtcggatggcggattttattaacgaaatgtttcatattgaactcacgatgtatgaattaactgtttgcccctccattcaagcggttactgaatacgtattgaaggaatatgccggagcgataagaaacctgttcccgaatgaagtgatggaaggcagccaatcggaaagcgtcgttttacgggatctggcatacactacacaatcgggcagagaagcgatggaggccagagcggcgattaccggtacctctcttaaagaaatcaaagataaattatttgagttttgccgcggtgacaagcacgttccaggcgtatatgttaatcagcaatcagcagatgcatttgctgaaaaaatgaaggcgttaacggaaggcacagcaggtgaattgtttgtaaagactattattgagaacggtgaagcggaaaagctggctcaattatgggtttggggggcggatatcgactggaaatccgttcatcaacatttacagcagccgggtaaacggatctcaattccgacttatccgtttgcaaaagaacgttattgggttccgtccaggactgagaagacagagatccctcagcattcttttcaacatcacttgcaaaaaaaatggagggagaatccgtttgtaaattcatccgaaacaaaagagtacggactgacagtagcatttgtaaatcaagacacagaatcaattgcccgcaccatttgttcggatatagatcaggagaatctgattgtcatcaaacatcactcttcatttataaaacactctgatcaaatgtttgagtgttctttattagatgaaaaccacgcatacgacgttatccgtgagatcttctcgggcggtgagcggcaggtccaaaatatatttgatttctcagatatcggaaaccagagtgacaatcagaacggcatcccatatggtaaattcttatttatacaagaaataattaagcggagtaaaaaggaaacaccattatccattttacaaatcaccaatggcttgcaggtatttaaagcggaaaaaccaaagctgacgggtgcagaatcagcggcttttctgaaagccctttctgcggaatacggctttgttcatgtgaaaacaatagatatagacagcatgaaagaaacgcatgagctgaaacaaatctttgagaatgaaagggcgcaatgtaccggagagaatgaagtatgctaccgcagcggcgtcagatatgttccgtattttgaagaagaaagaatccataccggcgagcctgtttcatttcctgcggataaagccatcgtgattaccggcgggacagggggcattggcagagcaatagctgaagatttggtgaaacggggagtgaaaaaactcgtgctgacgggtacgcgtccattacctttgcgaagtgaatgggatcatttgctgaaagagggcagacaggacgaaaagacagtcagcaatataaaactgtttcaaagttttgaagagaaaggtgtcaactatctgtattacagcggttctctcacaaatgaagagaagctgcgttcattctttcaccaagtaagccttgaatttaaagatataagcggtgtcatacactgtgccggactgcacagcggcggaaatccggcctttattcataaaagaatgagtgaatttaagacggtgtacgggccgaaagtcactggacttcagaatttggagcggatttttaataataggccgctggatttctttattctattttcatcaattgcagcacagtcacccaaactgtcgaaaggaatgactgattacgcgtctgcaaacgcatatatggactatttcgcggtttatcattttcaaaaggggagaacgtatttcacgtccatcaattggccgagctggaaagaagtcggaatgggtactgtgacgagtcctttatatgatgaattgggattggactctctttccacacgggaaggactggcgattttgtatcatgcactggagaaaaaatcggccaatatcattcctatcgtgaaaaaaggaacagtgtttcatgcagacagtctcctgaacatcaataaaaccggcggagcttcggttccagtccgaagacaggagactcccgacacttttgatcattcagaagggcttgtcagtgaactttctgccgtatttgccgaggaattgagcattccccttgaaaagcttaacccaaatacggattttcaggaatacggtgtggattctatacttcttgtcagcattatacatcgaatagaagcaatgattcagaaaaaaattgaccctactgtgcttcttgaacacaacacggttcatggtcttgcggaatatatcggtaagacggcgccgccgttgaagaaacaaatcgaacagactgattctcaaagcagcaatcagcaagatatgcaatctgtgacgagccgaaatacagaaccgcagacggcttccactgcaaagatagctgttatcggaatcggatgtaagttccctggagcggctgataaagaggaattttgggacaatctgagaaaagggaagaatcatattaaagaagtacctgattcccggtggaatatagaagaaaattactctccggtcaaacaaaagggaaaaagcatcagcaaatggggaggatttatcaatggaatcggcagcttcgatccggagtatttccgcatggaagaggagaaagccatccaaacggacccgctgataagacatttcttagaaacgagtgtacagactgtacgggatgccggttatgaagaaacggaattatcgggaaaaaaagtcggcgtatttgtcggttccagaatgggcggttacggtcacaaactgccgaaagaaagcagcagccacatcgtcgggcttagtcaaaactttattgcttcacatgtgtcgcatttctttaattttcacggtccaagcatggtttctgataccgcttgttcttcttcattagtcagcattcatttagcctgccaaagcataaaaaacggtgattcagagatggcgctggccggaggggcggatctgcttttggatgaaattccttacctgatgttaacagaaggaggagctctttcgccggacggtcagtgttttacttttgatgaaagggcaaacggctttgtacccggagagggttttggcgctgttctgttaaaaccgctggagaaagcgaaagctgacggagatcggatatacggtatcattgaagcatcagctattaataacgacggtgcgacaatgggaattacgactccgaatcctaagcttcaagagcaggttattcaagatgcatttgaaaaagccgatatcactcccggatcagtcagctacgtcgaaactcacggcacaggcacgatgattggagatccgattgagcttcaggctctgacaaaagtattccgaagagacacaaacaaaacgcaattttgcggagtaggaagtgtgaaaaccaatatcggacacttattaagcgctgccggagcggcaagtttcattaaagtgattttatcaatatggcataaggaaattccgcctacattgaattgtgaaacgccaaatccgcgctttgaatttgaaaagtcgcctttttatccgaatacagagctgagaagctggaaggatggaaaacggagggcgggcatcagcgctttcggttttggcggaacaaacgcccaccttttggtaagcggcctggatgattcatatcattccgtcagaactccgctgccgcctgctgagtttgtcagaaaagagtactggccggattcaaatcggaaaaaacaaatcaaacagaataaaaaacggcttcttgaaattattgatgaaacagagtagcacctgctctgtttctttactttgtaaaagaagaaaggttgtcgagttgcatgaggttcagcgtattagtcaaacatgacgattatattgtttcagaccatgtccttcatcaagtgcgtacgatacccggcgtaacgtatctggatttaataacacgatttttagctgagaaagggatatccccccgaagttttgaaatcaaacatgttttattccgtgaacctgttgcgacgtcagtccattttgataaaaaagtcaccttccagtttacggaacaagaaaacggctggcttgttgaaacaacaagcaggaaatgggtcgctgaaaaggcggaaggtgaagcgtcagtcaacttgcaggcggaaatcataagaaaaaatgcgataaacgaaaagacaatttcaatcgaagaattaaagaaaggggccgtccggacttcggatgctgaatccgcctatcgtaatttgcgcagaggcggcctgattcataaagattttatgaaattggaaggtacggtatatgaaggtgaaaattatattctgggagaggtcggtttaagcggactttcaaaagaatatacagatgacttttacatgcatcccgcatttttggatgggtctctcagcttgttgggaatccttacatcagacttgccggatgaaggaacaaatgcgtttatcccaatatatattgagacattccgggcactgcataaaacaactgggtcttgttttgtgtatattaataaaaccagtataacgcagccgccttctaaagacattttatatgcggacatagaagtatacaggcctgatggagagcttgctttttattatgagcgattcggtgtgaaaagagtcagaaatgaaaaatcaatacaaaggctggagcattcccaaaaagctaaagaagtcggcagcgtagcgaacaataaagaaatgatcagaaataatttgatccaagagatagccggcatgattgaaaaacctgctgaaacagtgaagaatgatatttccttttacgagatgggcttggattctaaacaattattagacttatccaaaaaattagaactgatgttaggttcaaagctgtacccgactttattatttgattactccacaatcggtgaattgacggaatttctgcaggagaaatacggagctgacattacagactctatctctgatacagttcagcaccaagacagtcataaaacattaacagatgagctgtcatccattattggagaggttacaaacacaccgccaaataaagcggacaaacaccaatctttttacgaactgggtcttgactcaaaacagctgctgcatatatcgaaaatgctcgaggaaagattggatacacaattgtatccgacattgctttttgattataacaatattcatgatttagcggcttatttagaagaaaaatatgatgtgcgtaatacgccggccgcagcttttaaagaaaaaacgcaaacgaaagagccgtctgaaaagccggtgtttgattccttgtatttacaaaaagaatggatagaatcgccattaaagtccggagaagtacctaaggaaaatacattgattttcgatttcggcagttcattgagtgatgaaatccgaaagtacatcggcagtgaaaatgttatttatgcggaagccgccgctgaatatgaaatagtaaatgaaaagcattataaatttaatccggagcagtctgctcattactccagactgttagaagatatgaaaaagtccggagcatttccggcgtcaatcattcattacctgtcaaaaaaagcttatactgaggcagcgttagatttgactcacagcttttattcaatcctttatttaagcaaagcgttgattcgtcaaaaaacaaaagaaaacatcaacattttgtacgtacatgacaagggtcaatatacaaatccggtttacgccgcgattggaggcttttttaaaacgctgaatgcggagcagccgaatataaagtgtaaaacggttgagatttcttcaagacaaaccattgaaaaagcacctttgcttctcaatgaattaagtgccggacatcatcaggctgtgaaatatgacggcgatcaaaaaaggcgggtgacagcatacaaagacgcttcgccgcaaacaggacaaaaggccgcaaagtttgcaaaaaacggggtgtatctcatcatcggaggattaagcggcatcggctggattatttcagcgtttctttatgcaaatcacggagccagcgttatcattgccgggcgatcgaaaatgacagcagacatggaagaaaaattagacagcatccgatatgacggggcaagcatttcttatatccaggctgacatgtcagataagcagcaggtcatcaagttagcggaaaaaattcgtgctgatttttccgaaatcaacggggtcatttacagtgcaggcgtgttaaaagactctctcattatgaataaaacagacgcggaagctcaagcggtgctgcaatcaaaggtcaatggtgtgattcatttggatgaagcgctcagagatatgcctttagacttttttgttttgttttcttccatctcctcagaaatcggaagtctgggtcaagccgattacgcttacgccaatcgttttctggagcattttgccgagtggagggaatgtatgagaaaggcggggggaagatcaggaaaaaccatcgctgtaaattggcctttctggaaagacggaggcatgtcagttgatcccggcattcaagatattatgaaaagggagtacggacttcacccattagaaaatactgccggaatcaaagcttttgaacactcgcttctcggccgaggccaccagctgatcgtgttatacggagaaaaagaaaaaatacaaaacgatttcaagccgttatccgcccgttcagcaccgcctctggtaagagattcagcgattgcagccgattttgatgcttcgtcagtcgttacggaagaagccgagagtcctttccgaatactcggcacggcttccaatcgtcatctcgacgattatttgcattattggagcagactgaagaaaggagcccttcagcacaatcaaagcgatgccgcaaaaaaactcatcgctttttaccagacagaagaaacggaaaccgttcattttctggcaaacacagaaaatgcccggcatatggaaatattgatgagcggtaagggtgaaacaattttactgatttgcggttttgctaccactgcttacatgtggaaagaacaaatgaaggagtgggcagatcaatttaatgtaattgtcatacacacaccgggttacgggctgagtgaggggagcgccgattttacactgagcgggctggctcagacttttatcgaagtgctgaacgagataggggttgcttggccgatccacattgcggcagcttcttggggaggcatgatagggcagaggatagcctatgaataccctgaaaaagtaaaaacgctcattctttccggaagttacaccgcatacgaagaagaccctgaaagcagtgtcgaggaaaaactgaaaaatgattttatagctataggaaagtcgcatgaatatgaaagtttatacagtaatcaattcttaaatgcttctattgaacgttttatgaagatacatcaacaagaaggctattctacgatcggctttttaaaagacattcatacaagaacgcttatccttacgggtgagaaggaaagcgtagttgatcagaaagaaacaaaaaggctgcagaaactgctgagcaatgcagaattaaagaaaattaagggagcggggcatcttccgaacatcacacatccggaagaatttaataaagcggtgtcagaattcatcaagaaatcagtaagtaagggatgaaaacgatacatacagtacagggggagaaaacaatgaaacaaacattaagcaatccggcatttgatatgaaacaaattaacgctcttaacggccattatcagacgatgatagacaatggagatctgcaatgtgcgagttatatgatgtcaagaggaggtgaggtttttgcagctgagtcgttaggggaatttaccggcggacaaaaagaaaagcaaacatttcagcttgatacaatcagagaaatcggttctttgacaaaagtgtttaccgctgtagccgtcatgcagctcgtcgaaaaaggtttgctcgatctgaaaatgccggtcaagctcattttgccagcgtttgataaaccgggtttcggagaaattaaaattttgcaccttttgactcatacggcgggattaagttttgagctggatattcaaaaggctgaaggcattgacttaacgaatgaggaagaatggataaactatctggttcgtacgcctttggagtacggagtggatgaagcatggaactattccagaaccggctttgttatacttggcatcattatttcaaaagtaacaggcgtatcctacgaacagtatgtaacaaagcatattattgaagcgctcggattagaaagaacgtatttttatgtgcctgatgctttaaaagaagaagtttgtgtgatcaatgagcacgagtgcgtacagctggaaaaaagtcatcacccgtattttccgaataaagcgacaagcggtctgtactcttcattgcgagatatttggaagttagctgaaatgtttagaaataaaggcagattgaaagataagaagctgcttggaagaaaaacagtcgaagcgatgctgagaaatcaaataaagcccggtcttcctttttacttcttcggagcgcccagagaggaaggcggctttggtttaggcattaatttgtggccggccggtgaccattatttcatgacagaaggcaccttctcacatcttggaatggggtggtgcggcatgttttctgatccagccgaagattttacgtatgtatttttcactccgatttccgagtttcatcctcatgccgtgctgacgccgctgaatatcgtgtgggcgggtattgaataattagacaaaagcatcgtcccgtctgttcggcaggcgggacgattgctaactgcccgtttttatcccgcggcatcttttcaaagcccgcccctaagttaaataacttaatttacactttgtaattttttttaattatagtacagtagagcatttttataatacagtttaaagtcttttatagtacagtttggcgcaatatgatcttaagttttataagcggtttcaaaatgaggttataaatgattgacggctttgtttaattactgtaaactatggttgttgatcatattgtactaataaaaaatctttttttattagtacagtttaaacgtcattatctttgcttaagcgctatgtgaatttctgaatgattaattttagaattgcagagcatgataagactgtttttaatacggatggctaaacggtatcctaaccctgttaaatcaaaagaagaggtggtttaaaaaatggctgcaaagacaaaaacttcaattgttgatagcaaaaaacaatttgatgctattcataagcagtttgaaacgttccaaattttaaatgctgaaggagaagtcgtaaataaagacgcaatgcctgatctttcagatgatcagttaaaggaattaatgagaagaatggtgtatatccgcattttagaccagcgttcaatttctctttcccgtcaaggacgtttaggtttctatgcaccgacagcgggccaggaagcttctcaaattgcatcacacttcgcgcttgaacaggacgattttatccttccgggttatcgtgacgttcctcagctgatttggcacggtcttcctttacaccaggcattcctgttctcaagaggccattttaaaggtaatcagatgcctgagggagtaaatgctttatcacctcaaattattattggtgctcaaattatccaaaccgcaggtgtagctttaggtcttaaaaagcgcggtaaaaaagcggtagctattacttacactggtgacggcggagcttctcaaggtgacttctatgaaggaatgaactttgccggagcatttaaagcgccagcgatcttcgttgttcagaataaccgctatgcgatttcaactcctgtagaaaagcaatcatccgcacagacaattgcccaaaaagcagttgccgtcggtattacaggtgttcaagtagacggaatggatgcacttgccgtttacgctgcaaccgcagaagcacgccagcgcgcaattaacggtgaaggtccgactctgattgaaactcttacattccgttacggacctcatacaatgtccggtgacgatccgactaaatatcgtacgaaagaaatagaaaatgaatgggagcaaaaagacccgctcgtacgtttccgcaagttcttggaaaacaaaggactatggtctgaagaagaagagaacaaagtgattgaacaggccaaagaagaaatcaaacaagctatcaaaaaggctgacggcgaatcaaaaccgaaagtaacagagctgattgagaatatgtttgaagagccgacgttcaacttgaaagaacaacttgaaatttacaaagcgaaggagtcgaagtaagccatggcgcaaatgacaatgattcaagcgatcactgatgcgttacgcacagaactgaaaaacaatgaaaacgttctgcttttcggggaagatgtaggcgttgccggaggcgtattccgtgcaactgaaggccttcaaaaagaattcggtgaggaccgcgtatttgacacgccgcttgctgaatccggtatcggcggtctcgctctcggtttaggcctgcaagattaccgtcctgttatggaaatccaattcttcggattcgtatatgaagtaatggattcaatctcaggacaaatggctcgtctccgctaccgttccggcggacgctggacttctccggtgacaatccgttctccattcggcggaggggttcatacacctgaacttcacgctgacagtttggaaggccttatcgctcagcagccgggtattaaagttgttatcccttccactccttacgatgcaaaaggactgctgattgcctctatcagagacaatgatccggttgttttcttagagcatatgaaactttaccgttctttccgtcaggaagttcctgaggaggaatacacaattgagctaggcaaagctgatgtgaaacgcgaaggtactgacctttctatcatcacatacggcgcgatggttcatgagtcgcttaaggctgctgaagagcttgaaaaagaaggcgtttctgctgaagttatcgaccttcgcactgtaagtccgcttgatattgatacgattattgcttctgttgaaaaaacaggccgcgcaattgtcgtgcaagaagctcaaaaacaagccggcatcgctgccaacgttgtagctgaaatcaatgaccgcgcgattctgagcctggaagctccggttctgcgtgttgcggcgcctgatacagtatttcctttctcgcttgctgagagcgtatggcttccaaaccataaagacgttcttgaaactgcgaaaaaagttcttgaattttaatcaggcatcataaaagacggtaaagagagtccttttctcttatatgaaggagtctgtttactaggttcaatgcttgcgaatgcataactaaaatttgcttaatcaactaggaggtcgaaaactgtggcatttgaatttaaacttccggatatcggggaaggtatccacgaaggcgaaatcgtaaaatggtttgttaagccgaacgacgaggtagaagaagacgatgttctggctgaagtgcaaaatgataaagcagtggtagaaattccttcacctgttaaaggaaaagtattagaattaaaagttgaagagggaacagttgcaactgttggacaaacgattattacgtttgacgcacctggttacgaagatcttcaatttaaaggaagccatgattcaggagaggcgaaaactgaggctcaagttcagtcgtctgctgaagcagggcaggatatctctaaagaagagactcctaaagagcctgcaaaagaaaccggtgcaggacagcaggaccaagtggaagctgatccgaacaaacgcgtgatcgccatgccttccgtacgcaaatatgcccgtgaaaaaggcgtggatatccgtaaagtaacaggttcaggcaataacggacgtgttgtaaaagaagatatcgacagctttgcaaatggaggagcggctcaagaagcggcaccgcaagaaacagctgcacctcaggaaacagctaaacctgcagcggctcaggctcctgaaggcgaattccctgaaacacgcgaaaaaatgagcggtatccgtaaagcgatcgcgaaagcaatggtgaactctaagcatactgcaccgcacgtaactcttatggatgaagttgacgtaacaaatcttgttgctcaccgcaaacagttcaaacaagttgctgctgatcaaggcatcaagctgacttatctgccttacgtcgtcaaagcattaacatccgctttgaaaaaattccctgttttaaacacatctattgatgataaaacagatgaagtgatccaaaaacattacttcaacatcggaattgcagcggataccgaaaaaggcctgcttgtgccggtagtgaaaaatgccgaccgtaaagccgttttcgaaatctctgatgaaatcaacagccttgctacaaaagcgcgtgaaggcaagcttgcacctgcggaaatgaaaggcgcttcttgcacgatcacaaatatcggttctgccggaggccaatggttcacaccggttatcaaccatccagaggttgcgattctcggtatcggccgtattgctgaaaaagcaatcgtccgtgacggtgaaattgtagctgctcctgtcttagctctttctctcagctttgaccaccgtatgattgacggagcaactgcacaaaatgcgttaaaccacatcaagcgtttactgaacgatccacaacttattttaatggaggcgtaatgttatggtagtaggagatttccctattgaaacagatactcttgtgattggtgcgggacccggcggctatgtagctgccatccgcgctgctcagcttggacaaaaagtaacagtcgttgaaaaagcaactcttggaggcgtttgtctgaacgtcggctgtattccttcaaaagcgctcatcaatgcaggccatcgttacgagaatgcaaaacattcagatgacatggggatcactgctgagaacgtaacggttgactttacaaaagtccaagaatggaaagcttctgttgtaaataagcttaccggcggtgttgcaggtcttttaaaaggaaataaagtggacgttataaaaggggaagcttatttcgtagacagcaactctgtccgtgtaatggatgagaactctgcgcaaacatacacatttaaaaacgcaatcattgctaccggttctcgccctatcgaattgccaaacttcaaatatagcgaacgcgttctgaactctacaggcgcacttgcgcttaaagaaattccgaaaaagctcgttgttatcggcggcggatatatcggtactgagcttggaacagcgtatgcgaacttcggaactgaattggttattttagaaggcggagatgaaattcttcctggcttcgaaaaacaaatgagttctctcgttacccgcagactgaagaaaaaaggcaacgttgaaatccatacaagcgccatggctaaaggcgttgaggaaagacctgacggcgtaacagttacattcgaagtaaaaggcgaagaaaaaacggttgatgctgattacgtattaatcactgtcggacgccgtccgaacactgatgagctcggccttgagcaagtcggtatcgaaatgactgaccgcggtgtcattaaaacagacaagcagtgccgcacaaacgtaccgaacatttacgcaatcggtgacatcattgacggacctccattggctcacaaagcgtcttacgaaggtaaaatcgctgccgaagctatttcaggagagccggctgaaatcgattacctcggtattccggcggttgtattctctgagcctgaactggcttctgtcggttacactgaagcacaggcgaaagaagaaggcattgaagtcgttgcagctaagttcccgtttgcagcaaacggacgtgcgctgtctcttaacgaaactgacggcttcatgaagctgatcactcgtaaagaagacggtcttgtaatcggtgcgcaaattgccggcgcaagcgcttctgacatgatttctgaattgagcctggcgatcgaaggcggaatgactgctgaagatatcgcaatgacaattcacgctcacccgacattgggcgaaatcactatggaagctgccgaagtagcaatcggaagcccgatccatatcgtaaaataataatgcaacaaagaaacagcccccgtttgtaaaagcgggggctgtttttattgtgcaagcacatgctgcataggtttgatgatatcctcttttttctttacggatccctcaatcttcatgaccacatgccgatgattgatcaccatcagcgcagggaacgtgttgatttcctcttcccatccctttctgttgtcataaaccttcatttgatcgacatgatggggatatttcttttctaaatcaagaatcgcatcgtaataaggcacttctttatctatatgattttcatcggaaaaaaacaagatttgagtgtgatgaatgctgtcgatccggttttttgtgaatggactgacagtagaaaccgaacagcttgacagaacgaacagcatcaaaaaaaagggaatcaccgtacggtagcgcatctatcttactcctctgttttatataatatatgggttcatccatttataaggactatatcaagtgtatcacgagaggtgaaaaacctaaggcttgttactgaattgttatataattgaaaccgtttttaatgaagaaataatacgtgtgacaacttgcgcagccgatgtgtaaaaaaggcacattgtttttcgtgagagcgctgttttttcgttatactgggagcaaaaccatatcaggagggattgtcatgtataaagccgctgcagccgtcatatgtatgtgcttactcgccggctgccaatcaaatgaaaagatgcaaacaaacaaaccccattctcaagccgcggccaatcatgccaaacgggaaaaccaccatacaaaagaggaaaaacagaaaaaacagaaggcggagccccgttactatatcaatccgaatagcttttctgtggaaaaaatggatgaacagaaagagaaaaaaccgatcgcattggtaacgatcgatgacgcgcctgatcagcatgccgctgagattgcggacaaactgcacgatctcaatgcgtcagcgatcttttttgtaaacggacattttttgaaaaaagatgaaaataagaaagcgcttaagcatattcatgagttaggttttatgatcggtaatcatacaatgactcatcaaaacttaaaagatctttccgaacaaaaacaacgggaagaaatcatcggcgtcaataaagcggttgaaaagataataggagagaaacccgcatttttcagggcgcctttcggaagcaatacggactacagtgacagacttataaaaaaagaaggtatggtgaaaatgaactggaccttcgggtatgattgggatcagaaatatcaatccaaaaaagcgcttaccgatatcacactgaacagtccttatctgcgggacggggccaacatattgatgcatgaccggaaatggacggcggaagccatgccggacattgtaaaaggattgcgtcataaaggatatactgtgattgaccctcgagctataaaaagaccgtaaaaaataaatgtgttatacaatttatcagttgacatattaaatgtgacataataatataataacaacaagtgaaaattaagcgttttcaaattctgagaaatggggaatgacagatgggtacaattgtttgccaagactgtaacgaagcgattcattactttgaggatgagaaggtcacgacgttatacggaacatgctgcggacaatgccagtgtcatcttgaagaagagtaaaaagcgtaaaaaggcccgaaacgatttcgtttcgggcatctttatgtttattggatggctttttgctctttgatgactctgatcatttcaagcgttgcatcttcgggaccctgcacaggaaggccggcgtccaagtttttaaaaatgtagctgatattttcttcagtaatgatctcacccggaataaagatcggaattcccggcgggtacaccatgacaaactctgcgatgatccgtcccgcggattcttttaacggaatgacttccgtatttgcgtaaaacgcgtctcttggcgtcatcgctaacagaggaatttcaggaagcagaacttcggtttgctgatgagcatagtcattgtcggaagcctgctttgaaatgtctgtaagcgcgcttacaagacggtcggcatctcccgctctgtcgccgggggtgaaaatacataaaatattatacaaatcggacagctcgacttcgatattatatgattcgcggagccatttttcaacgtcatgacccgtcagtccgaggtttttgaccgaaatgattaatttagtcggatcataactgaatgcagctttagaccctgtgatttcttcgccgacacagcggatgccttcaatttgattgaggcgttcccgtgtctgatccgccagcagaatcgtatcttcaagaagatcgcggccttctgtagcgaggcgttttcttgcgacatcaagtgaagcgagaagcagataggatgttgacgttgtcgtcagcatgcttaaaatcgactgtactctttctttggaaacaagaccttctctcacatttaaaatggagctctgcgtcagggagcctcccaatttgtgcacgcttgtggctgccatatcagcgcccgcctgcatggcggacagaggaagcttatcatgaaaatgaatatgcacgccgtgcgcttcatcgacaagcacaggcacatcgaaagaatgcgcgagctttacaatgctgctcaagtcagctgccacaccgaagtacgtcggatttatgacaagcaggccttttgcgtcagggtgctccgtcaaagcccgctcggcggactcaagcgtaatgccgtgagaaattccgagctcatcgtcaatttccgggtgaataaaaatcggcaccgctccggaaaatacaatggccgacataatggatttatgaacgtttctagggatgatgattttatctccgggtccgcatacggccatgaccatcgtcataatggcgccgctcgtcccttgtacggaaaagaaggtatggtctgcgccgaatgcttccgcggccagatcctgggcttctttaatgatgccctttggcgcatgtaaatcatccaggggttcgatattaattaaatctatgcttaacgcgttttctccgataaattgtctgaattccggatccattcccgcgccttttttatggcccggaatgtggaattggacaggctgtctgtccgcgtgctttttcagtccgctgtacaggggtgtttcatgttgcggcaattgttttcccacctttatcataatacctacggattagtttgtattacattcagttttattacccgttttttaaacgtaaaacaaatgaattatattatgaacttgaaagaaagtaaagaacaatttatgatctatggaagatgcttattttgagcatgattataaaggagtgaagacatttggaatatcaatatccgatgaatgaggactggacgacagaggaggccgtggatgtcattgctttttttcagcaggtggaaaacgcctatgaaaaaggagctgaccgagacagacttctgaatgcgtaccgccgctttaaagaaatcgttcccgggaaagcggaagaaaagaaaatctgcagccaatttgaagctgacagcacctattccccgtatcggactgtgaaacaggcgaaacaatcagatcaagcgattatcaaaatgtagacaaagcgagccggcaatcggcccgctttttatgttatgagactttctgagtcagtgtgtataaaaaggaaagcttcctaaaagcatcttcaatggtttgcaggaattcattgttgttcatgttgatcacgtcttctttttgcagctgaatgccgcacaaaagctctgcttttttcactgtctgcagacgttcaaataatgttttcagctgctcctgatccatgtcggactgcttgtacgcccctggcttcgtatgatccggcgaccatacaaaatgaccgggaatctgttttgtgatgtcctcctgcttcgcttccagcaatctgccgtattcctcttttatcggagattcataaatgatggcaaaccatacaaacatatgggtgtcccataaaccgatctgaaagtgagggagtttcttatacccgcgtttgctgttggcaaaggcaacccagctgtcagccggcgggttgacagatcttctcgcgtgcttggcgacatgcgggaacatttcatcgcccgtcaatgctgacaatgtcggtgcgaaatgctctcctaacaaggtcagcttcgggcggacttgttcttttaacacctccatgcgcggatctaaaccttctattgtaaatgtatcgaagtcttcttttgtaaaacgcatctgagtcatctttttcctccttatcgtaagtattcatattttaccacagccgccgccggccgcaaaaacattgagaacgtttgagccgagaggattggtggtaaaaaacgaataggtaaacacacaattttaagaatgttgttacagccgaatataagtttccatacgatataagaagtatcattaataaattggaaaaatgggatgcttttttaacaaatgatctctggaaggggcgaaagacaatgaggcaagtggtgaaggaaggattcagggaggaaaaaaataaccgtgtagctgtctggagactagaggttgattatgaattggcaaccctgtatgaggccatgcaaaaagagaatgcagatcaaatcgatctcagcaaaagaaaactggaacgtctcagaaaagaatggattcggcttaacggataaagaatagtaaaaacgaaccgcaggaaatggttcgtttttacgtgagaaggcatttttttcattttccttgctttttcatcgcctttatcagtatgctatagaataagctatacatagaaaagaggtacacggtatgacaaattggacggaaattgatgatatcgcaaaacaatgggtaaaagaagccggaacgagaatcagacaatccatgcaggaaagcttgacgattgaaacaaaatcaaatccgaatgatttagtcacaaatattgataaagagacggagcgctttttcattgaccgtatacagggaacttttcccggacaccggattctcggagaagaagggcagggggataaactccgctcccttgacggaatcgtctggattattgatccgattgacggaacgatgaattttgtccatcaaaagcggcatttcgcgatctccatcggcatctttgaagacggaaaaggcaaaatcggcttaatttatgatgtgatgcaggacgaactgtatcacgcattcagcggaaaaggggcttatctgaacgacacgccgcttgctcctttaaaagaagcttccattgaagaagccattattgcaatcaatgccacatgggtgacggaaaacagaaggattgacccgagtattttggcgccgctcgtaaaacgggtcagaggaacgcgttcctacggttcggcggcacttgagctggccagtgttgcggccggccgcattgacgcatacattacgatgaggctcgcgccgtgggattacgctgccggctgcgtgctgctgaacgaagtcgggggcatttacacgaccacagacggcgaaccgtttacgtttttagacaaccacagcgtgcttgcgggcaatccggcaatacataaaattatctttgacgactatttacatgctgacaggtagagattttgaagaagaagatctcgggtttctggagcagctggcggcatcacacccggtgtggaaaaacgaagagttcggaacaaaaaatgcggcggagtttatgcttgcatactccatgtacaatggaacatggctcgtatgggagattgacggcgctcctgccgccgtcagttttcatttggaatgggcgccttcaaacggaaaaccgtggctcggaaccgtggccgtcgctccggaggcaaaagagaaaggaatcggacgcgcggtcattgaagagattgcgggccggctgagaggggagcataaagcgatgttttcagctgttcccctggacaggcaggaatgggttttgtttttaagccaatgcggctttgaacagcttaagcttgaaaaagacgatcgtgaaaagacatatatgatcatggtgaagccattgtgaaatgtttcagatataaaaaagagaccggatttctccggtctcttttcttgtttacaagccgaccgcattccaggccgcttctacgcttgcagcgtcttgagagccgtaaaggtcccgcgctgattgaatcaaagctgcttttgcatctttaaagtttgatgacggagtgagatataccgttagtgcgcgatagtaaatctgctccgcttttttcacgccgatttttgtaatcgtgttgtaagcggctttgttcggaattccgctgtttgtatgcacgccgccgtagtcgccggcatcagtgttcggaaggttttgataatttttgtaatggtcgggctgtccgtattttgtcggagtggataaactgcggagagccggctggctgaccgtaatatcttcaccgatatcccagtcctcagtatcattgaagtatccgaatacatcagagaaggattcgtttaaagcgcccggctgattttcatagttcaggttggctgtttcctgtgtaacaccgtgtgtcatttcatgggccgttacgtccattgaaccggaaagaggcgagaagaatgagccgtcaccgtcaccgtaaatcatttggtcgccgatccaggccgcgttattgtatttgctgccgtaatgaacggaagatacgattttgccgcctttattgtcgtagctattgcgtttaaacgtctgatagaaataatcgtacactttgccgagattgtaatgcgcatcaacggcagcgcgctgagaagaagttgtgaactggttggtagtgcttgatacgagtgtgcccggcaggttatattgtcggttttgcagatcgtacgtaataatttgcgttccggtaggtttagaaagatcacgcattacatatttgccgctttcagaagaaatatttaatgagaccgtttttcctttaagagtcgtacctgttccggttgcagcggcatgctccactttgttttgctttttcaggactttccctgtttccgcatcaacggttacttcccagttagctggttccggttcgatgtagcggatggttacatcataggcgaggcggtatttaccgtcttttgtggccgctgctttcagctcggctttgtttttgtttgtaacgttgccgttagagacggcttcaggtgatttgccgattgctttaaaagcatgatccagcgcctgatttgcagataattttttgctgtttgccgttttggcagaagcatcgttgtttaattcaccgttaatcgcatagacattgttggatttatcgacgtgaataatgacttgcgagtctttcacaggcacaccgttaacgacaggcacataacggaagtgcttgtagccgagatcatcggtcgtgtggtcaatcagcttcagtctctcagaagggttgcctttgaagactttgccgttttgtttcaagtattgcttgattgctttgtcactgactgaaggcaactcagactgcaccaaagaatgcttcggcacaaagttcgtcaggttttctttaagctgaggattctcagcggcctgaacacccggaagactgatagttaaactcataaaggaagcggcgacagcaacagacaatttcttacctaaacccacaataaatccccctttttgaaaataatgaaaacttatattgttataataaaccagcattctctcattctgcaatataaaactagactccgctgatgaattgatagaatcgtcccggaaaggcttccggcggccagcatcgggggataagccgagaggcacgtgttgaatcagacatgagtcgaatgatgcgatttattctgaaaaaaatgacaaatgaagtcgggaaaaatgataggggaaaaatgttccgatctgtaaaactttttttatagccgtttgtctaaatgggtgaggccttaataaacgaaaaggattgtttcagatgtcagagattttcagtcattttattcagcatttcgacagatatttcattttaagcagacagagcgtgttgatcattcagtggtcagccgtctgccttgctgttttatacgcgctgacttttcatccgaaaatcagccgtgagagagtttggttttattcaggaattctgtcagggccgtattattagcgggcataacagttgaattggttcatcaggtgcagagtacttactttagcgcgcactatttgatatcggaagaaagagagcttcttccgatcgttcatctcttaatgtatgggtatgtgctgctcaccgcgtttcactatatgctcatgacgcgggagcagaggggaaagggcatgttttatacgtttgatctcgctgtggtgacactgcccgtcattcagctgatcttcagctttttcactttctggaatatcagtcccgatgcgatggcgggggaggatatagtttcgatgctatgttttattacgattgttttacttctgctgatttctatgaatgttttattctttaaaatgtattggaaaccgagacctgtttttatcggagtgttttatgttggagtcatcgggctgttggtgtgggtgctcgctgcgccctcggcaggtgtaacaaaagattacggcagacttctcccatttacggtgtatttaacgatggccggttttctgatgacccatcatttatttcatcggtcagacaggatcagacagcggaagaaaagctttcttgcgggagcaacggccgctggttttattgtctttttgaatccggtatacaatgcgggagatgccgcttttgcggtttcaaagccaatggctgaagatactgttgaggatgttggtggacatatcacttcagaccaagcggaacggatccttacatcattttttccggcagagaatccgatttatttaacagaaaccaatcaggatctccattacttttaccgttttaaaacgaaagattatgaagcggaagtggacgaggtttcccgattgattacaaattaccaatatcttaaaaaaccggaaggccgcactttaacagaagaggaataccggaaaaagtcgctggatttcttgtcggcacacggccgaaaaataaaaacacaaggcattcagacaacagtgagaaaagaaaacggacagtttgtcgtggagattgcgccgaaaacacaagggacgaaacacgaagattcgggcacagtattttactgggaaaaagacaccattatgggtttttcagaagacccgtctatttatcagcttgagtcactgccgcaggtgcatatgacggaaaaagacatagtgaaagcatcaaaagccgcctttcgtacgcttcaaatgcctgatcagacatttgaaatcacaaatacagatataaacagcctgatcggcagcagtttgaccgtaactgcgaataacggaacggagctgatatttgatgcagtatccggacgtcttatgaaaatcagagtctcacctgacagcaccgttttaacaaaaacagaacttcagaagaagcttttttcattgctggacgcggatacttcaaagcttagacaaattgataaatcggaaggcaatctcgtttttgaaaactctgaaggcacattcgtttatacgctccggaatgaagaaggcatgaaagaggcctcattctacggacaggtaagtgccaaaacattcccgcatacatacagagacggacaaacagccttcaacaaagtggcggcagcttataacggcaccatttacaaaaagcgggtgaagcctgtcatagcggtgaaagacggcgtaacatataaagcatggctcgtcattattcagccgttcggttcaaaccgtcatgacgcatatgtagtgaacgcggatacttacgaggcggtgaacctttatgaacaataaagaaaaaaaggctgtcttcttcgatttatacgacctatataaggagggggaacttgaaggcggcacgctccagtggatgaaagaacatgagcatttattcggagctgaggcggaaaacagaaaagggcagtatgaacatggtttgaatgcgccgtccggcgatatccgccagattaaatacatgaaatgcctgacgtatggattgtacggattcttcattgtgctctcaatctggatgacagtgtggttttatttttaaatgaaaaacaagatgtcaattgaacagctgtatcgtgaacattatcaagatattatgtattacctttacagacgcacacatcatgctgagaccgctaaagacctcgctcaggatacatttatgaaagcatttaacgggcttgattcgtttaagggccattcgtctatcagaacgtggctctatgcaattgcgcatcataccttcatcaattggtacagacgtgatagaaaatatcaattttcagatatcaccctgaatgaagggcttcagcaaacaacatatgaactgccggagcattacgtcgcccggacagacactcagaatgcgctgaccgggcagattcagcgtctgaaaagcgatcagcagaccgttttaattttaagggaatttcaagagctgtcttacgaagagattgctgatgttttggactggagtctttcgaaggtgaagagcaccctgtacaaggcgagaatgcagctgaaacagcacttggcggaaaaaaggaaggacggacagatatgacttgctgtttagtgagagatttactccctttatatattgaaggcgattgtgaaacagaaacggagcggtttattttccgccatcttgaatcatgcggtaagtgcgggagtttatatcatatgatgaaggagccgcttgacctcggcagccctgagatgaaggcgccagcctgttatgcagaagaagaaaggcggtttaaggaacggtattacgggaaactgctgataaaagcagcctgtatgttcggcgctgttttctttatcatgctgatccttaaactgctgatttaaaaaaacgcccggctgaatgaccgggcgttttaatccgtttactcagccggatgaaaggctgtataaatgccttcaagcaattcctggggcagtgaattaaagaatccggcacacagctttgcttctttttttcctgctcctgctttttcagcaagttcctgatcaaatgtatacacaccgtcttcttcaatcagcgcagattgaaggatatgaagactttgggaaaaagcggtgaacagctgatcaacgataagggcctctttttccgtaaagccgagctccaccgctttttctttattaaatgtatattcgccgtccgttttctcaatacattgggaaagtacggttaaaaattcggttgaactgtcccacagcttttgaatgatctgggcttgttcttgatctaatcccaattcaaccgctttttcgccgtcaaaataatagataccgtctttttcgtaaatcgattggctgatgatgtcaatgagttttgccgcgtcttccggtgttttctctgcggaagcctgcaggacatgcggttcatttgcctgaatcgtttttgcgccggcagaatcaagcggactgaatgcaagcaaggcggctgagacggttgcggcggcagttacagcggttttcttcaaaaaaggtgttttcatttcgttctctccttgtcatgtgtatttgcttacagccacaagtataaaaagacaatgatggaattgaaataggaggtatggtattttctgcataacgatgccggactatttcagactgcatattctgagggaatctgctgatgtaactagaatgggagctgtcatttccggcttcctgactaggcggcgggggagataagccttacatctcagcctgttttgaggatgtaaaaaagcctgaatctttgattcaggcttcattagatattttctttccatgtttacggaattttgcaaagggtcatgcttttaatcaagcagtccctgttcgcgcatttttttctttacggtgaaaccgcttcccatcatggcgataacgagaacaatgcttccgatgatgccccatgcgcttttctcagcgattgatacgccgatcagcatcatgctgaagactgctgcgaatgcaaataataataagagccaattcaattttttcatatttccatcccctttaacgtcatactttcagtttacagaaaaacgtaacgcttttaaagaggatgtgtggtataatatgaaagttatctaatttttttaggagatgaaaatgtgaaacttcgaaacgatcttcgcaacatcgcgattattgcccacgttgaccatgggaaaacgactttggtagaccaattgcttcaccaagccggaacattccgtgccaacgaaaatattgccgaacgcgcaatggattcaaacgatcttgaacgtgaacgcggtattacaattcttgcgaaaaatactgcgattaactataaagatacacgcattaatattttggacactccgggacacgccgacttcggcggagaggtagaacggattatgaaaatggttgacggtgttctgttagtcgttgacgcatatgaaggctgcatgccgcaaacccgtttcgtactgaaaaaagctcttgagcagaacttaaatccggttgtcgtcgtaaacaaaatcgaccgtgatttcgcccgcccggaagaagtcattgatgaagtgcttgatttgttcatcgagcttgacgcaaacgaacaacagcttgagttccctgtcgtctacgcttctgcgattaacggaacggcaagtctggatccgaaaaagcaggacgaaaatatggaatcactgtatgaaacgattcttgaacatgtccctgccccggcagataacgccgaagagcctcttcaattccaagtggcgctgcttgattacaatgattatgtcggccgtatcggtatcggacgcgttttccgcggcacgatgaaagtgggtcagcaggtttcattgatgaaacttgacggaacggtaaaatcattccgcgtaacgaaaatcttcggtttccaaggattgaaacgcgtggaaattgaagaagcgagagcgggagacctcgttgccgtttcgggcatggaagacatcaacgtcggtgaaacggtttgtccggctgaccaccatgagccgctgccggttctgcgcattgatgagcctacgctccaaatgacatttgtcgtaaacaacagcccgtttgcaggccgtgaaggcaaatatgtcacagcccgcaaaattgaagagcgtctgaacgcgcagcttcaaacagacgtcagtcttcgtgtcgaaccgactgcatcacctgacgcatgggttgtttcaggacgcggtgagcttcacctgtccattttaattgaaaacatgcgccgtgaaggctatgagcttcaagtgtctaaacctgaagttatcattaaggaaatcgacggcgtaagctgcgagcctgttgagcgcgtgcagattgacgtgcctgaagagcataccggttctgttatggaatcaatgggtgcgagaaaaggcgaaatgcttgatatgattaataacggaaacggccaggtccgcctgatctttaccgtaccttcacgcggactcatcggctattctactgagtttctgtcactgacacgcggtttcggtatcctgaaccacacgtttgacagctatcagccgatgcaaaaaggccaagtcggaggccgacgtcagggtgtgctcgtttccatggaaaacggaaaagcgacatcttacggaattcaaggtattgaagaccgcggcgtcatcttcgttgagcccggaacagaagtatatgaaggcatgattgtcggcgaacataaccgtgacaatgaccttgtcgtcaatgtcagcaaaatgaaacagcagacaaacgtccgttccgctacgaaggatcaaacgactacgattaagaaagcgcgcattatgtcgctggaagaatcactcgagtacttaaacgaagatgaatactgtgaagtaacgccggaatccatccgtttaagaaagaaaatcctgaataaaaacgaacgtgaaaaagcggcgaaaaagaaaaaaacagcaggaatgtcttaatcacttgcagaatttgaaaaggtagaacccgaacggaaaaggggagggggatccttttgaatgaagtaagtgaacggctgtcgttctttgcggctctttaccaagtggatgagcatccgctgacgggaatgtggctgttatacggaacgatcgtcgtgctttcggtgattgtatttaaacttggctttgccaaacggctgccggtgttgaaggctgcggcagtttatctctttctcgtgctcggctgcaccgtactgacttttttcggtgtgtttctgccggtcggagaagggcttgttgtcgccgccttgattttgatcatttacaaaatccgtctgcaccagtccaaaaaaagccagtcagctaaaccgcaataaaaaaatgaccttgccttccggcgggtcattttttattcggtttattttttcagtttatcttttttcgctttttgtccgggatgaaaggaaaagtgtccggtattcagccgcgcctccgttttgactttgattcggtcatggcattcccggcacatatatgtatgaatcggacgattgcggaggcgtttggctgtcagtgtttcatcatcaatttgttcgattttgtcgcaaatggaacattttactctcattgatttttcacctctttcactatgacaagcattataacatggatgcccctcctgccaaagggaaagaaagcagcgcccttcctttggagcgggcgctgctttttaccggcggtttttcatatgatgatccgattgatcgttctgttcgttttgcagcttgttctggtctctttggttcagctgatcatcattcgattgagtcggtgattctttttcattgtcggtcacatcattcgggacttccggcatgacacggccgacgatggcggcaagttcgtccaaaatgcctgaaacggggcggccggccttaatgtcgctgcccatgcctctcagacgggaaaccgtatcaggatcagccacgacaacggcattggcgccgtaaggatcgttttttaacgcctgggcaaccgtgtatttaatgctctccactttgcttctttctaaattgtcatccacatcgataccgacaacggagtatcttccgagtacaaccgcggtggcatctgaaatgccggggattttttcggttacctcgacgagatgcttagcgatgtctgtccggccgggattttcagctgtctcaggagccgtatttttcacatggatcggttttgcatcgcgctgatcggctgattcgttctgaatattgcggccgcggccgtcctgtacagcagtgcagccggtaaggataaacaaggcttgtatgataatgaaaagaattcgcacgtcagatttcctccttgaatgctttcatttattttattgttgaattaaccttctatctttattcaccaaatcatatattttagcaggcatccccgttattcgcggaaagagaagcacacgatgggctttgatccttatttcaggaggctgagacttgagtaaaatttatgtgttagatacgaatgtacttttgcaggatcctaacgccattttttcctttgaagaaaacgaagttgtcatccccgccgtcgtgctggaagaggtcgattcaaaaaagcggtatatggacgaggtcgggaggaatgcgaggcacgtatctaagctgatagacgggctcagggagaaaggaaggctgcacgagaaagttccgcttgaaagcggaggaacgctcagaattgaactgaaccaccggtcatttcaccagctccaagaaatttttatcgaaaaaacgaatgataaccgcattttggcggtggcaaaaaatttaagccttgaggaggagacgaaagaaaacggccgcctcgtcatcctggtcagcaaagatgtgcttgtcagggtaaaggcggatgccatcgggcttttggcggaggactttttaaacgacagagtcgttgaccatgatgaaatatatagcgggtacaaagatatatttatgaataaagagcggtttgcctcgttttatagagacaaacaaatttcagtcaaggagcttcagcagcatcaggtttatccgaatcaatttgtgctgatgaaagatgaattaggaggatcttcgtctgcggtcggcatgacagataagaaaggcgagaccgtaaaaagactcgttttcgatgatgagcacgtatggggtatcaggccgaagaacgtccagcagacaatggcgcttgaactcctgctgagggaagatatcccgcttgtcaccctgatcggaaaagcgggaacgggaaaaaccttgcttgctctcgcggcagggcttctgcagacggaggatctcggtatttataaaaaactgatcgtcgcgcgtcccatcgtcccggtgggaaaggatatcggatatttgccgggcgaaaaagaggaaaagctcaagccgtggatgcagccgatctttgataatcttgaatttttattcaatgcgaaaaagccgggtgaacttgaagcgattttggcaggaatcggatcgattcaggtggaggcgctgacatacattcgggggagaagcattccggatcagtttattattattgatgaggctcagaatttgacgaggcacgaggtcaaaacgcttttgactcgggtgggagagggcagcaaaattgtcctgatgggcgatccggagcaaatagatcacccatacttagacagtttaaacaacggacttgcttatgttgtagaacggtttaaagaacaaaccgtctccggcagcgtgaagcttgtgaaaggtgagagatccggccttgcacagctcgccgccgatttgttataaaacttcgatttctgtgacgcccgttatcgggttttcaaagtctccgtccacgtaaaaatggaccgggccgccgtcttgaaggggtttccccgcatcgctgaaatgcgcgattgcgtccatcgccttttcgagcggcacttcggttctttctgattttgaaataaatgcgcacaggacagcgctttctttcggctcggcatttgctaaaacagcgccgagcttcatggcgaagctgccgttcatcagtctttctttttcataacgtttttcgctttttaaagtcggcggcgaaatgcgcccttctctgatcacccgttccggatcaagcgtatgctcctgggtttctgcagagccgtccggatgaacaggctgatttttttcaaacggaaacttacggtcatcgaaaatccagacactcggatcaattgtaatcgggtatgtaacattgccttttacttgaataacgctcatggtgaagcccccctttacttaaagtataaaagttttcgcatgaattgtcactttgcgtcgcaaattagatgtatacaacggcagcgaagtgaggatgatcgacatggtatgccggcattaccaagagctggacgcattagttcaagaagcgaaaaaaaggaccgaagaaggcaaagtggcagactatattccggctctggctgaatctgaacaagacagcctttcggtcacaatttatcatgcggaaaatacatgtctgacggcaggagacgccgaccggacatttacgctgcagagcatttcgaaagtgctttctctggcgctcgtactgatggattacggaaaggaaaaggtgttcagctgcgtgggtcaggagccgaccggcgacccgtttaattccatgattaagcttgaaacagtgaatccgggcaagcctttaaatccgatgattaatgcgggagctctcatcgttacgggtttcattaaagggcattcgccgaaagaccgcctggattacctgctcggattcatcagaagacttgcgaataatcaggacattacatattgcagacatgtcgcggaatcggaattcagttcatccatgattaatcgggccatgtgttattacatgaagcagtatgacatttttaaaggcgatgttgaagaggtcatggatttgtatacaaaacagtgcgcgattaagatgagcagtctggatttagccaaaatcggctgtgtattcgcccttgacggcaagcatccggaaaccggggagcaggtcattaaaaaagatgtggcgagaatctgcaagacgtttatggtgacatgcggcatgtacaatgcgagcggggaattcgcgattaaggtcggcattcccgctaaaagcggcgtttcgggagggatcatgggcatttcgccgtacaacttcggaatcggtatattcggcccggcgcttgatgaaaaaggcaacagcatcgcgggtgtgaagcttttggaaatcatgtctgagaaatacaggctgagtattttttgaaacatttttatcataacatctgcttaaatcctcttgcaatttcatctgataccctttatgataaatagaagaattaggtactcgcctggggaacggagggatacttttggcttcagagattatagttgaccatcagcagaaagcattcgagctgttgaagttagatgctgagaagattttgaagctgatccgagtacaaatggataacttaacgatgcctcaatgtcctctgtatgaagaggtcttggatactcagatgttcggactgtcgagggaaatcgattttgctgtccgcctgggattagttgacgaaaacgacggcaaagagctgctggacagacttgaaagagaactgtctgctttgcatgacgcgtttacaggaaaataaatgatcaaactcaaactatttaacggtttgggtttttttataaccgtaaaccgttttttttgcatcttcttttcgtaagacggtctcttaatctgcatttcatccgaaaaactataaagaaactgcgtaaaatgtttatgaattatagtaaaatataatacgcaataggtattaaacgtaagctttaagcaggaaagaggatgttatgtttaaaagaatgttaaaatcttacgattattcattgatatgcgctatcattctgctgtgctgtttcggattggtaatggtatacagctcaagcatgattaccgccgttatgcgttacggcgtgagcagcgactatttctttaaacggcagctgttcgccgtcatcgcggggtttgtgctgtttatcatcgcggccgtttttccgtacaaagtgttcgcccatcaaaagattcagaaattcatactgcttgcgtcagtggctgcgctttgcgcgctgtttgttttcggacatgttgccggaaacgcgcaaagctggtttaaaatcggcggaatggccattcagccgggggaatttgtcaagctgaccctgatactgtaccttgccgcggtatacgcaaagaaacaaagctacatcgatcagcttttgacgggggttgctccgccggtgatcgtcaccgtagtcatttgtgcgcttatcgccattcagcccgacttcggaacggcgatgattatcggtctgatcgcgttttgcgtcattatgtgttcgggattcagcggaaggaccctgctcaggctggtgctcatggcgggaatcgtattgctccttgtcagcccgatcatctatctgaaatgggacgatattttgacacccgggcgtatgagccggtttgaaagccttgaaaatccatttaaatacgccagcacatcaggcctgcagattataaattcgtattatgcgatcggctcaggcggttttttcggtctcggtcttggagaaggcattcaaaaatacggttatctgcctgaatcgcatacagactttattatggcggttatttcagaggagctcggcattttcggcgtcctgtttgtcattgtgctgctggcttttgtcgtgttaaaaggtttttatattgcgagaaaatgtgaagatccgttcgggagccttttggcaatcgggatatccagcatgattgcgattcagacctttatcaatctcggcggtgtcagcggcttaattccgattacaggtgttccgctgccgtttatcagctacgggggctcatcaatgttgttgttattaatgagcgccggtatattggtgaatgtcagcatgcatgtcaagtactcagaaaagaagaaaaagagggagcccgttccgtctaagggggtaaaaagacggcagacggaaaaatctgtgtatctctaaaaaacaagtgtatacacaggacggatattcctttattataaactacatatttattaggccaagggggagaaaagtttgtcacaacaatccatccaaaaagtgttagtagcaaacaggggagaaattgcgattcggattttccgggcgtgcacagaattgaacatcagaacggtagccgtttattcaaaagaagattcgggctcctatcatcgctataaagcggatgaagcttatcttgtgggagaaggcaaaaaaccgattgatgcgtatcttgatattgaagggattattgagatcgcaaaaagaaacggcgtagatgccattcatccgggctacggatttctctctgaaaatatccaatttgcgagacgctgtgaagaagagggcatcgtatttatcggaccgacgtcagcgcatttggatatgttcggagataaggtaaaggcgagggagcaggcagaaaaagccggcatccccgttattccggggagtgacggaccggctgaaacattaaaagatgtcgaacaattcgcaaaagtccacggatttccgtttattattaaagcatcgctcggaggcggaggccgcggaatgagaatcgtccgaaacgaaagcgaattgaaagaatcgtttgagcgggccaaatcagaagcgaaagccgcattcggaaacgatgaagtgtatgttgaaaaactgatcgaaaatcctaagcatattgaagttcaggtgatcggagataaagaaggcaatgtcgtccatctgtatgagcgggactgttccgttcagagacgccatcaaaaggtcattgaggtggcgcctagtgtatctttgcagcctgaattaagggacgaaatctgtgaagcggctgtggcgcttgcgaaaaatgtcggctatatcaacgcagggaccgtggagtttctcgtagcgggcggtgaattttactttattgaagtgaacccgcgcgtgcaagtggagcatacgattacggaaatgataacgggggttgatatcgttcagacgcaaatcctcgtggcgcagggccacggactgcacagccgtgccgtcaatatccctgagcagaaagacatttttacaaacgggtatgcgatacaatcacgtgtgaccactgaagatccgctgaatgactttatgcctgacacgggtaaaattatggcttaccgctcaggcggcggcttcggcgtccgccttgatacgggaaacagcttccagggcgccgtcatcacgccttattatgattcactgcttgtcaagctgtcgacatgggcgctgacgtttgaacaggcatcagcgaaaatggtccgcaacctgcaggaattcaggatcaggggcattaagaccaatattccgtttcttgaaaacgtggcaaagcatgaaaaattcctgacgggccaatatgacacatcgtttatcgacacaacgcctgagctgtttgttttcccaaaacagaaggaccgcggaacaaaaatgctttcctatatcggcaatgtcacggtgaacggttttccgggaatcgggaaaaaagaaaaacctgcatttgataagcctcagaccgttacgttaggtatcgaagaaaagccggcaagcggtacgaaacagatccttgaggaaagaggcgccgaggggcttgcagactgggtgaaagagcaaaaatccgtgctcctgaccgatacaacgttcagggatgcccatcagtccctgcttgcaacccggatcagatccaatgatttgaaaaaaatcgcgaatcctacggctgccctgtggcctgaactgttcagccttgaaatgtggggaggcgcgacatttgatgtagcgtaccgtttcttaaaagaagacccttggaaacgccttgaagatctccgcaaggaagtgccgaacacattgttccagatgctgcttcgttcatcaaatgccgtcggttatacaaactatccggacaatgtcatccaaaaatttgtccggcagtcagcggagtcaggtattgacgtattccggatctttgacagcctgaactgggtaaaagggatgacgctggccatcgatgccgtccgtgaaaccggaaaagtggcggaggctgcgatttgttacacgggagatattcttgataagacccggacgaaatatgatttgcaatattatctttctatggcgaaagagcttgaggcgtctggtgcgcacattctcggcattaaagacatggccggtcttttgaaacctcaagccgcatacgaacttatctcagcgctgaaggaaacgattgatattcccgttcatcttcacacgcatgatacgagcggcaatggcgtctttctctatgccaaagctgttgaagcgggtgtggacatcgtggatgtcgccgtcagctcaatggcgggtctgacttcacagccgagcgcaagcggattttatcatgcccttgaaggaaacagccgccgtcctgaaatggatgtccggcaggtggaaagactgtcgcaatactgggaatccgtccgtcaatattacagtgaatttgaaagcgggatgaagtctccgcatactgagatttataatcatgaaatgccgggcggccagtacagcaatctgcagcagcaggcaaaaggagtcggcctgggtgatcgctggaatgaggtgaaagacatgtacagcgtcgtcaaccgcatgttcggcgacgtcgtgaaagtaacaccttcttccaaagtcgtcggagacatggcgctttacatggtgcaaaacaatttaacagaacaagatgtttatgataaaggcgaaacgcttgattttccggattcagtcgttgagctctttaaagggcagatcggccagccgcacggcggatttccggaaaaactgcaaaagctcgttctgaaaggacagacgccgatcacggtaagaccgggtgagctgcttgaaccggtatcttttgaaggtattaaagaagaatggaaagaaacgcatcagatggaattgagtgatcaggacgcaatcgcgtatgctctttatccgaaggtgtttactgaatatgttaaaacggcggaacgcttcggtgatatttccgtattggacacaccgactttcttctacggcatgacactcggtgaagaaatcgaagtggaaattgagcgcggaaaaacgctgatcgtgaagcttgtatctatcggtgaaccgcagccagatgcgacacgtgtcgtttatttcgaattgaacggccagccgcgcgaggtggtcattaaagatgaaagcattaaatcgtccgtacaggaaaaattaaaagcagatcggacaaacccgagccacattgcggcatccatgccgggaaccgtcattaaattgttaacggaaaccggggcaaaggtgaataaaggcgatcatctgatgattaatgaagcgatgaaaatggagacgacggtacaggcgccgttctccgggacgatacagcagattcatgtgaaaaacggtgaaccgattcagacaggcgatttactgatcgaaattgaaaaagcgtaaaaaatgaacctaaaaaaacctgatccgcccccgtgtgcgatcaggttttttatgtgtaaaggccgaagctctaatgcttcggccttttcatgtgcctcagatgttccgctgttttgattcatagcggaagcgggcgattaataataagaaatagcataagacgccgaacaggccggcaataaagagcgaatgggcaagtgcaaagccggtggccatttctgaataaacaaccatgattccggagagcgcctgtaatacaacaaaggcaagagccgctatccagcccccaagaatctgtttttggtctttgtaagagcgcaccgcatgtgcaaaagcgacaagaatccatacgaacagaagcagcgctgccgttctgtggcccatctgcacccattcctgaaaatgggacggaagcccgtgattcagcctgctgcaaagcggaacgtcagggcaggcaaggcttgatttcgtatggcgtacataagcccccgtataaacgacgatatacgtgtaaatcgaaaggccgatcatatgaaactgcattcttctgccgattctgagcggcttgacgagctttttgtctgatttatcagcttcgaatatgagcagcgtcaaaatcagaacagaagcgaaagaaatcagcgatatgccgaaatgaagcgccataacgagcgcatttgatccgaaaacaaccgctaatgcgccgagaagcgcctgtaaaaataaaaagataatggacataatggcgagaaaggttgtttcacggaaaacaggcgtgacttttctccatgcccaaaaagcgagactcagcacgagaacgattgagacaccgcttgcgagtctgtggctccattcaatgatagaagcggcgttaagctccgggaaaaaccggccgtggcaaagcggccactgccttccgcatccgagacccgatcctgtctttgtgacaagagcgccgccgatcagcacgacgagcataacgaatgtcgtcagcacgccgagcgctttcaaagctttattcattttacattcaccttcttaacaaactggacaaaatgatatacgtaccaagtgtaagcgaatatgtgttttgtggcaattctcaattctgtttgttcacaaaaatataatagaatcaggacttcttagataatggggttgattattccagatgggtctgatagaaataaagtaaccgctttattatgaaaccggcggatttggtaaaattcataaaaagttcacaaataaattcctgtttctcgtttaatatttaagaggatgtttttttacaggtcattatcttgtatgatagagttgcaggtcttaaaaaacctgctttaggtttgtaagggaggtttacgttatggctaattccagaattttaaacgatacagctatagacggacagattgaagagacgacggcatggaaggatttcctttcgcttatcaaaataggaatcgtcaattcgaatttaattacgacttttaccggcatgtggcttgcgttacatatatccggtctgagttttttaggcaatttaaacaccgtgcttcttacattaataggatcttctttgatcatcgccggttcttgtgcggttaacaactattacgaccgtgatattgatcatttaatggaacgcacgaaagtaagaccgacggtaaccggaaagattcagccgaatcaagcgctgtggtcaggaattttactcattgctttaggacttatcatgcttttgatgaccaccgtgatggcagcagtcatcggttttatcggcgtgtttacgtacgttgttctttatacaatgtggacgaaacgccgttatacgattaatacggttgtcggaagcgtatcaggcgccgtgccgccgttaatcggctggacagcggttgaagggcacatcggtgttgtcgcgtgggttttattcatgattttattcatctggcagattccgcactttttagcgcttgcgattaaaaagacggaagattaccgagctgcgaatattccgatgcttccggtagtgcacggctttgaagtgacgaaaagacagattatcgtctgggtcgcatgcctgctgccgcttccgtttttcctcggcagtctcggtcttccgatcgtcattctcggcactttgctgaatgtcggatggcttgttctcggactgatgggattccgcatgaaaaacatcatgaagtgggcaactcttatgtttgtctattcgcttaattacatgaccatttattttgtagcgatggtggtctttacgctgttttaattgaataatgagcttgtttgatcgccaaaacaaacaatgacaactagtaaacgccgccttgaccttttgtttaatcaggcggctttgcttttatacatagatggaattttaagtaaaaaatctcatattttaagaaatgaggaaaagaagtatttcggctggaagcagatttactgcttgtgcatctcgtactgattcaaaaaaggggttgggtgaaatgttaaagcgttggcgtcttttatcattattagccttagtgccgcttttattgagcggctgtggaaaaccgtttctgtccacactcaagcctgccggcgaagtggctgataaacaatatgatctgacggtgctcagcacacttatcatggttgtcgtcgttgcggtcgtagcagttattttcttttacgtcattgtgagattcagacggtcgcgtgtaggggaagacacgataccgaaacaggtggaggggaaccgttttttagaaatcacctggaccgttattccgatcctgcttctgattattcttgtcattccggttgtcatcgatacattggcgctggcggatacgtcgccgatggataagaaaaaccgtaaagcagaggatgcgctcgtgattaatgtaagggcgaatttatactggtgggaattcgagtatcctgattacgggtttgtgacaagtcaggagctgatcgttcccacagatgaacgcgtctatttcaagctgaagtcctcagatgtgaaacactctttctggattccgtcagccgggggaaaaatcgatacgaatacggataatgacaatactttctttctgaccttcgattctaaacgcagcaaagaagcgggagaatatttcttcgggaaatgcgcagagctgtgcggaccttcacatgcgctgatggatttcaaagtgaaaccgctgccgtcaaaagaatttaaacaatggacgaaagcgatgaaaaattataagcatacaacagactccggtttagccgcgcaaggagaagagctgtttaaggaaaaaaactgcctgagctgtcatgcggttgagcccaatgataaacgggctgaagcggcaagaacggctccgaacctcgctaccttcggtgaacgggtcaaagtggccggcattaaggatgcgaataaagagaatataaaagcctggctgaaaaatccggacagcattaaaccgggcaataaaatgacaggcacttatccgaagctctcggacgctgaaacggatgcgctgtatgaatatttaaaagggctgaaagcggagaacaagtgaggacagggagatatcaggggggaggtcgtaaatgatgaatacgcttacaggacagcaaagaaaaagctctttgctttgggattatttgacgacggttgaccataagaaaatcgcgattttatatatgatcgccgggggatttttcttcgtcgtcggcggacttgaggccatgcttatcaggattcagctcttgaggccggggaacgattttatgggtgcgcagcagtttaatgaaattatgacgatgcacggcacgacaatgatcttcctggcggcgatgccgctgttattcgggctgatgaacgcggttgtgccccttcagatcggggcgcgtgacgtatcgttcccatttctgaatgcgctcggattttggctgtttttcttcggaggcatctttttgaatctgagctggtttttaggaggcgctcctgatgcaggctggacgtcgtacgcgtcgcttgcgctgaattcgaaagggcacggcatagactttttcgtgctcggcctgcaaatatcaggcttaggtacgctgattgcggggatcaactttctcgccacgattattaatatgagggcgccgggtttgacgtatatgagactgccgctgtttacgtggacgacatttgtggcgtcggcactcattttattcgcatttcctccgctcaccgtcggtttggcgctgatgatgctggatcgtttgttcggaacgaatttctttaatcctgaattgggcggcaatacgataatctgggagcatctgttttggattttcgggcatccggaagtatacattttaattcttcccgcctttgggattttttcagaaatcattcccgtatttgcgaggaaacgtctgttcggttattcatctatggtctttgcgatcgtgctgatcggctttctcgggttcatggtttgggttcaccatatgtttacgacgggactcggaccgatcgctaatgcgatatttgcggttgcgacgatggcgatcgcggtgcctaccggcattaaaattttcaactggcttttgaccatctggggaggaaacgtcaaattcactacgcctatgctgtatgccgtcgcctttattccttctttcgtactcggaggagtcacgggtgtcatgctggcggccgcagcggcagattatcagttccacgatacgtattttgtcgtagcgcatttccactatgtcattatcggcggcgttgtgttcggcatcctggcgggggtgcatttctggtggccgaaaatgttcgggaaggtgcttcatgaaacgatggggaaaatttcgttcgtcttattttttatcgggtttcatcttaccttcttcattcagcatttcctcggtttgatgggaatgccgcggcgagtttacacatatctgcccggccaggggcttgataccggcaacctgatcagttcaatcggcgcgtttttcatggcgggcgcggctgctttactcgtcgtcaatattatttatacctcaataaaggggaaatacgtcgggaacgacccgtggctggacggtcgtacgcttgaatgggcggtctcttcaccgccgccggaatataattttaaacagcttccgtttgtccggggacttgacccgctgtggattgaaaagcaggccggaaatgaagggatggcgcctgcagagcctgtagaggacattcatatgccgaacggatccatcatgccgtttatcatatctttcggtctgtttgtcgcagcgttcgggtttttataccactccgattattcatgggggcttccggttatcttcatagggctcggcatcacattctttaccatgctgcttcgctctgtggttgatgattacggctatcatattcacaaagaagatctgccgaatgatgataaaggggtgaaggcgtaatgcagctgcaggaaaaaatgacggctgaaacctttccggcttctcctgaaaaagcaacgctggaggggaaaaataagtttttgggattttggctgtttctcggcggggaaacggttctgttcgcctcgctatttgcaacattccttgctttacgggaatctaaagccggagggccgtcaacggctgagatgtttgagctgccgatcgtatttatcgcgacgatgcttcttttaacgagcagcttaacgagtgtgtatgcgatgtatcatatgaaaaatttctcctttaaaaaaatgcaggtgtggcttttggttaccgttttattgggagcaggatttttaggggtagaaatctatgaatttatgcattacactcacgaattcggctttaccattacaagctctgcgctcggctcagcgttttacacgctcgtcggcacacacggagcacacgtggcgttcgggctgttatggatcagcgcgctgatgatccgaaatgcgaaaagagggctcagcctttataatgcgccgaaatattatgtggccagcttatattggcattttatcgatgtcgtgtgggtctttatctttaccgttgtatatttgatggggatggtgggataacgatggacgataacaaaaacagagtgactgtcagtacggatctcgaatatcggaaaaagaaaaatgccgaggagatgaaatatcaggtcatatccttcggcttgatgatcggtcttacgcttgtcgcgtttttgacggtggctgcagacggcattgccggatggtttacgatgccgtttctgatcctgcttgcggtcatccaggtcatctttcagctgttttactttatgcatatgagccagaaggggcatgaagcgccgtcattatttctgtattcgggaatatttgtcgcgtttatcaccgtgcttgcatttgtcacgattatttggtggtaatcgggacggcggggagtgagagatttgattaatttggaaatgttcgggtttcgcgcaatgtggagcccgtatctgttttgtataactgccgtgataacaggtgtttacttttactggtgcagccggcataaaggacgtgtgtccgctaaggagaaggtgctgtttgtgctttccgcgctatttttttacgcggctgcgggaagtccggttgatttattgggccatgtgatgttcagcgcccatatgacgcagatggcggttctgtttttagtcgtaccgccgctgttgatttccggaattcccggctgggcatggaaaaaactgatcttccgtcctgtcgtaaagccgctgttttcgttcttttcaatgccgcttatcgcattagtgctgtttaacggtattttttcactgtatcacatcccgtttatatttgatttcgtcaaaacggattcgctgtatcacacgctgatgaacggactcatctttgtaacggcgttttttatgtggtggccgcttgtgcataaggtggacggtctgccccgtctcagcggtttaatgaagctggggtacattatggcagacgggattttgttaacgccggcctgcgcgctcattatgttcagcggggcgcccatgtatgccacgtatacagatccggcggcttgggccgaagcaatgaagctttgcgttcctttagatttgctggaggagatccctttatccgggccggagatgtttaacacgcttcctcctctggaagatcagcagcttggggcagtactgatgaaaatcattcaagaggcggtctacggaacatatttggctgtcatcttttttcagtgggtcagaacggaacgggaaaaagatacgctgtcagagccgccgtatatcgagcataccgtctcatgaaaaaaagtacagcagaatatgctgtacttttttattacatttgcactgtttttaataactcttccaattcaagcagtaaagctttgctttcagcgacgacatgttccggaaattcttcagcgctgccgtattctacgccgtgcggataataatgctttcctaaaagaggggccttcagctgaatcacggcccggctgccgccgacatcgccctcttttgccgttccttgaatccgcagataaaatgtcccctcaggtactgaaaactttttgtcgtaagtcactctttcataatcccattgtccagccagaatgagccctttaccttccatcagatcattcaagcggctgagctccgctgttaccccttcaagaccgctgttttcaaacttcaaaccttccccctccttttaaaaatgccctttcctgacaatcatagtatgaaagcgttacactttcaatgattcatacggtgaaagtatgcaaaaagaaaaatttgacgacaatagtagcagaaaaaaggaggaattccgcaatgacaaagatcaataagctcatgacgtcagacttgcaatattgtacagtattagataatgtatatgaagctgcggtgaagatgaaagacgcagatgtcggcgccattccgatagtggatgaagacggcgccacacttgtcgggatcgtgacagacagagatctcgtattacggggaattgcttcaaaaaagccgaactctcaaaaaataaccgacgcaatgacagagcgggttatcagtgcagaagaagacgcctctgtggaggaggtgctccatttgatggctgaacatcagctcagaagaattcccgtcacaaaggataaaaaactggtcggcattgttacgctcggcgatctttcgttggccgagcaatcaaatgagcaagcaggccgagtgctgtctgacatttctgaagacggcggtccggaggggtttatccattaaacataaatcacggacgatgcaaataggctgtactgtataagagtaaacaaaaacagaacggtttgaacatatgggggtgagaggttgaaaaatatcgcaagggctctcgttatccttttgcttatttacggagcgtatgttctgtttatacaatatggatcggctcctcagaaaaagacggatcaggaggagcctcaggtttccaatgaagaagagagcggaaaacggctgaaaatgccgtcatccggactgctttctctcatggggaaatctgccgccgatgtgaaaaagaaacttggggaaccgtcccggaaagatccttctgcctacgattacgagtggtgggtgtacaaccaggggaaagaccaatacgtacaagtcggtattttgaatgataaagccgtgactttatacgcttcgggaagcggcatcaacgcaaaaccgtttaagatcggcgaatcgacgggcgaagtttttaaaacgactcaggtttctccttttgtcaatgtgactgacaagggaaacacgtatcggttcgagttttctgaagaagatatcaatacccgtcccaccgtcaagataggcggaatgtatgttcagctgtacatggacaaatttgacgggaatctgtcaagcatcagggcatttgatgcggaaacacttgtgaaacaaaggccgtatgaagtcatgtacagaggaaagctgacagaacccgagcctgtttctgataaaaaatggaacgacattgaacgagcgagtgaacagcagattctcgatattacaaatgtcatccgcgtgaaacacggacttgcaaggctgaaatgggacgaaggcgccgcaaaagtggcattcggccacagcaaggacatgaaggataacaagtatttctctcacgtctcaaagaaatacgggactctgaaggaccgcttggaaaaaggcgatgtgaaataccgggaggccggtgaaaatattgcctacaactatgtggacggtcctgcagccgtggagggctggctgaacagcgaaggccacagaaaggcgctgttaagcccggattatacgcacctcggtgtcggcgttgatcagaagtattatacgcaaaacttcattaagccttggcagtaaaaaaccgcagaggggcgcgtcccccgcggtttttttatgttttttcgcgagcggcgctcctgctgaaaaaaatatacctgctttttttcgcaatttaggcgaacattaaggcgcatgaaccgatacattatagcaggcaaaacttttcggagggggtgagaattgtggcgaatcagcaatcacggcaatcaatcgatgattttaaacaattcgtaaaaaagcatcccaaactgatccaaaatgttcgcaaggaacaaagaagctggcaggaagtctatgaaaattgggttcttctgggcgaggatgatccgatatggaacccttttaaagacgaggccgttcagccttcttccgacgcggaaaccaaacaggaaccagctgaaaaaaacgatttcgtttcaaaaatggtcactgccgtcaaaaagatggatatcaaccaaatgaatgagcagatcaataaaatgagccaatccatttcatcattgcaaagccttttaagccaattttcggggagcagcacgaagcagccccggcaaggctccggacaacatcctttttcgttcagaaaggattaaagaaggggatcgtgtatgcgaaaagaggttcaggaattcatatccgcagatgaggaacggaaacggtttatacggcagcgtcccgtctggtaccgcagacttgcgagaaaaccggacgatctcaattcctttcagcttgacatgatgaatttttatgaaaagacgataccgcatcgggtaagccaattctcaaacgggattcaaatggcgcagatgatgatgcagatggttcacgccatgcgttcacaggattaaaaagcgtttaaacgccgcattttccaattgggtggtttcatggtaaactagcaactggaggtgcgtatttatgtatgcaacaattgagtccgtcaagcttcaaagtgaagcggagcagcttgccggcatgattctgcagtctgagacggctgaaaattaccgcgattgttacaagcgtctccgtgaagatgaagaggcagggcggatcattcgttcttttatgagcgttaaagagcagtatgaggatgtgcagcgttttggcaaataccatcctgattatagagagatttcccgcaaaatgagagaaatgaagcgggaactggatttaaacgataaggtggccgaatttaaaaaagcggagactgagcttcagtcgctgcttgacgagatcagcattgaactcggaacggccgtctcggagcatgtaaaagttccgacggggaatccttattttgacggcctgtcatcctgcggcggcgggtgcggttccggcggcggctgcggatgcaaagtttcctgacgagacggccgtctcgtcttttacataaaatgaacagaaagtcaggcgggtgatcatgatggaaaataagcgccaaggcataatcgtatatctgcattccttaaaacacagcaaaatgctgagaaaattcggcaacgttcattatgtttccaagcggctgaaatacgttgtgctgtattgcgatatggacctaatcgaaaaaacaatggaaaagatttcttcttattcttatgtgaagaaggtagagccttcttataaaccttttttaaagctggaatttgaatcaaagcttgataaggcgaaagagtacgattataaagtcggtatataaaaaaatccccgcagatacctgcggggtccttctattccttaacaagttaaggagaaggaaaagggagaggagaaaccggaggaagaacttatggggaaacgtaagtcttctccgcggttggcaacaacatcattcattgatgctgttacacgtagtcttgacaggaatgtgaatatgtatacacgtttttcacgttcattgtttgaaagaatgctttatgataagatagggattgttttgatacataacggctcagccgatgagaaacatcaaagttttcagaaaaagtggtgtgaataatgagagtaatttccggttcaagaaaaggacgagccttaaaggctgtgccgggcacatcaacaaggccgacgacggataaagtaaaagagtctatttttaatatgatcggcccgtattttgacggaggaacggggctggatttgtttgcggggagcggcggtctcgggattgaagcgctgtcgcgcggatttgaccgctgtatctttgtggatcgtgatttcaaagccatccaaacggtaaaagcgaatatcaaagcgcttgatctgctgtcatcagcggaagtataccgcaatgaagcagagcgggccctctatgccgcggcgaaacgggaaaaaggttttgacggaattttcttagatcctccgtataaggaacaaaagctgaaagcgcttatcgaaatgattgatgagcagaacatgctgaatgaagacggttttgtcgtagccgagcatgataaagccgttgcgcttcctgaagccgtcggcgcgctttctgtaacaagaagggaaatttacgggcttacaggagtgacgatataccgaaatagggggtaatgatgtggcaagtatagctgtatgtcccggaagttttgatcccgtcacctacggacatctggacattatcagacggggggcaaacgtgtttgagcaggtgtacgtatgcgtgctcaataattcttctaagcagccgctgtttacagttgaggaacgatgtgagctgttaagagaagtgacaaaagacataccgaatgttacggtcgagacgtcacagggactgttaatcgactatgcgaaaaaaaagcgggcgaaggcgattatcagggggctcagagccgtttctgacttcgaatatgagatgcaggggacttccgtcaaccgcgtgctcgacgaatcaatagaaactttttttatgatgacgaacaatcagtactcttttttaagttcaagcatcgtaaaagaagtcgcaaaatataacgggcctgtttcagagtttgttcctccggaagttgaacaggcgctgatgcagaaatttaaaggatgagaagcgctgattggcgtctcatcctttttttgtccgtgctgacagcttgtaacaataaatcaatgcgtatacggcgagagctgtcagcgtgatggcgggaccggtttcaacaagtgtattccatccgctgacggcagcagataccgcgtcctgatcgcggaaagggaggaatacggactggtaaggttcgtccaatgcaaggtaaagcggcttccacagtaagagaataaagagtgcggcataaatgccctgaaggatacgcgccgcgaaaaacggtttaaagcggatatctgtttccgataaaatgccggctacctgggcctgtacggaaaggccgctgaacccgagaataaaactcacaatcatggctttcggcagcaaggcggcatcagcttcactgaccagcttgctcccaagtgtaatttcaaacattccgctgataagagggatgtccagatttgccggaagatgaaaaagcgaaagcagcgcgtttgtaaatacagaaagcacatccatgacttgtacgattgataataaccggctgaaaaccgaaaacaatataataaaaccgcccaccatcagcaaggtttgtacagaagaggtgacggcgtcgcccaaaatttttccgagcggccgcttttccgaaagccgcgccttgtggagggccagaaatgcttccttcagagaagggagagcgatcgtctttttaccggtatacgccgcttcttctttccgtccgtatgaacgcatcgtcaggccgacggcgatgtttccgagatagtgagccgatgccagcagaatgccgagagacgcgttatgaaaaaagccgactgccacagcagcgaatataaataacggattggatgaattggtaaaagagacgaggcgttcagcctctactctggagatttgtttatcctggcgcagccgtgcagtcagcttcgcgccggccggattgcctgaagccatgcccatagccagtacaaatccgccgacccccggcactctgaaaatgggacgcataaagggttcgagtaaaaggccgacaaacttgacaatgccgaatccgattaaaagctcagatagaataaaaaacggaagcaatgaaggaaaaactacctcccaccacatggaaagaccggttttggaggcttcgaatgaggcctgagggtgtgaaataaccgtagccgtcaaaaaaatgaaaaacaatgaaatcaaaaatgtatgaaacttagacaaattcattcttacctccccgatgctaaaattgcacactgacatttatatcatgataaaatatagaacagaccttaaaggcggccgggcaagtacctatttgtcatcctgtactaatatacgagcataggggttcaatttagaccatagaattcatgtataggatgtctattagggggttcgtcgcgttggccaaacctacaatcgggttagcgttaggttcgggaggggcaagaggcatcgctcatctcggagtgttatccagtttacataagcatcagattccaattgatatgattgccggcagcagcatgggagcattagtcggaagcttttatgcggccgggcatgacgtggccacgatgaaaaaagtcgctaaagcatttaagcggcggctgtacgcggattatacgatgccgaagctcggatttttaaaaggagaccgcatcaggcagctcgttcatgcctatacgtacggcaagccgatagaagaactgcggatcccgctcggcatcgtggcctgcgaccttcagaccggcgaaaaactcgtttttacgaaaggttcagtgtccgaagccgtccgcgcgagcatcagcataccgggcgttttcgtcccgcaaaaaatgaacggacgtatgttagtcgacggcgcggtggtcgacagaatcccggtttccgccgtaaaagatatgggtgctgatatcgtcatcgcctctgacgtatcccgggtgaaaaaaacggaaaaggcggcacatatttttgatgtaatcatgcaaagtatggatatactgcaaaatgaattggtccgtcaccagaccattgccgcagacgtcatgatccgcccttctcttgaatcattcagctcaagttcttttgccaacattgatcatatgatcacagcgggcgaagaagccgcagaccggatgatcggccggattaaacaagaaatagagaactgggagggctaactcatatgaaagcaaaacattttcgctgggtgtttatcatcctgatcttattaatcgctgttacatttattaagcttccgtattacatcacacagccgggagaagcatcagagctgagaccgctgattaaggtggacggaggctatcctgaaaaaggaagcctttccttgatgactgtcaaagtaggccccgccaatccgtatacatatctttgggcgaaagtgcatccttacgaagaaatcgtccctgatgaaagcataaaagaagagggcgaatcggactcggattatatgaagcgccagctgcaaatgatgaaaagctcccaagaaaacgcggtcattgccgcttatcaaaaagccgggaaacaggtgaaatactcatttaacggaatttatgccagctcagtcgtctctgacatgccggcaaaaggaaaaatagaggtcggtgataaaatcatcagcgcggacgggaaaacatacgaatccgctgaaaagctgattgattatatcagcagcaaaaaagcagggggaaaagtaacgtttcacattgaacgggacacgaaagaaaagaccgttgacattgtgctgaaatcattcccggacgacccgaaaagagcgggaatcggtgtcgcattatatacggaccggaacgtgaaagtgaagccggatcttcatttcagcattgaaaacatcggcgggccttctgcgggtctcatgatgtctttagaaatttacaaccagctgacaaaacctgacgaaacaaaaggctataatatagccggaacggggacaatcgacgtggacggcaaagtcggaccgatcggcggaatcgatcagaaagtcgtcgccgcagacaaagcgggaaaagatattttctttgcgccgaatcaaaacggagctgaaaattctgattacaaaaatgcggtaaaaacggcgaaagcaatcaagtccgatatgaaaatcgtccctgtcgacaccatgcaggacgcacttgactatttggatcagctgaaagtaaaaagcacctgatacagacaggtgctttttttacgcattcaaaaaacgcttttcgtcttcatcatagcggatcggcgcttgtgaaaattcctgtttctcaaacaatgtgcgttcaggttcgtttatcggcaggctgtaaacccgtcccgccagtatgtccagatccagagcgggatgagagaaagaagagagcttgctgacgagaggtgcggtaagctcttttttctttgccgacaggtacgcctgtccttttttcgtcattccgagaagacggatataaggagcgcttgaaggctttaagagccgatgcatgtcttcttttttcgtccgtgtcagaatgtgcgtgtttatccgctgcagcctcgtccacgtgtatcgttttgttttcaatcgttccatcatttcgcgataggatcgggcttgtctgatggtgcgcagaattctgtgctcaaggccttcttccacttcatagattcggctcaattcttcagcggaaagagtgctgaggctgtattttacatatgaaaaatagtcttccgtgctgtgccatatgccgtatgaatttctgtatgcctccagctcacgcgcagacgcttccgggagaaagctccttgcggccgccgttcctttttctatcagcgctttccggatgcttgttgcgctggctatccggctgttatctccgggaagctcggcgtcatgatattgggaagcgattctggctgtcgtataaggcttcatagcggaatcggaggtgtgtatcgctctaacgtagtgaaaaccgagaatattgttcggcttggacaaatcgagcatgtcccgccctttgaatatgtgtgaaaaagcttttgaggcggcggccggatagctgagaccctttttcagctcctctttcagaatcaggctgcagtcatcttcctttcggctgaacgcttcagacgcttcaagaaaggattcgatccgcccgttttcgctgccgaaaaacaagctgctgcatcctaaatgatgaagaagcgaaacgctgccgcgcgcgaataattccgctttttgtacggcatatatataagggagctcaatgacgatatccacgccgttttccagcgccatttttgtccgggcccactttgagacggcggccggttccccgcgctgcaaaaaagggccgctcatcaccgccgccgcgacgctgctgtccgttttgatttttgcttgttccgcatgatagcggtgtccgttatgaaagggattatattcaacaaccaggccgactgctttcatatttgtcccgcctttcttgctatgttttgcttcgtgtggtacatttgcaaatgaagtgcatattttagtccgtttcgtttagtgtatgcatagcctatccggctgtcaacgattgcatgacggcggcattatgctgtaaagaaaaaatattgacaaaaacattctgaaaagctataatcatgtttgttgctttcctgaggtgatacaaatgaaatggacgatttatcagcttcatcaaatggcgaaaaagagctttgaatttgatgaaacagttgagttaaatgagctgacaaaattgaattctgacatccgccgcatttctcccgtccgggtgaagggccgcgcggagattgaatccaagcaagtttcgtttgactttacgatttcaggcgaaatggttttgccgtgctcaagaactttagttgatgtgccgtatccatttacaatcgcgacaaaagaactgtttagatttcataagtcggatgatatagaagatgaggacgttcattttgctgaagacgataccgtcgacttaactccgatcataaaagaagagattcttttagaaattcctatgcaagtcttttgtgaaactgaacaaaaagaaggagccgctccccaagtggggaaagattggcaagtgatttctgaggaagacaagaaaaatcaaatcgaccccagacttgcggatctgaaaaagctcttaacacaagatgatgaatcttaactctttaaggaggtgggaataatggctgtaccttttagaagaacttctaaaatgaaaaaaagattgcgccgtacacatttcaaactaaatgtacctggtatgacagaatgcccgtcatgcggagagatgaaattgtctcaccgtgtatgtaaagcatgcggatcatacaacggcaaagacataaatgttaaaagcaattaatgtatgaagaaaagcgcgggaatctcggttcctgcgcttttcttttttttgcccctccagcctgctcccgccgaaaaaattgtgagccccagtagtctatctaatctatcagcggcatatgtatgaggtaaatgagcaaatatggagggagatacgattgacgataacgagacaagacgcgtggacgcaagatgaagatttgctgctggcagaagtggtgctcaggcatattcgggaaggcgggacccagctttccgcttttgaagaagtcggcagagcgctgacgagaacggctgccgcctgcgggttcagatggaattcttatgtcagaaaacaatatcagtcagggatagaactggcgaaaaaacagcggaaggaattaagaaagcagatcggggtgcattccgccaatctgccgggaaccgtcaaacagcctccgatccgcagggctgaaggagaaaaagagctgtccattgatgatgtcattttgtttctgcagcaatttaaagagtcgccagccgcagcggatatgcgtcatgaaaaagaaaaactcacagaacagctgaccgcgctgcaaaaagaagtcgaggatctgcgtgaggaaaatgaaagcttgagaaacaagctggagatgacggaagaagattataaagcgttaattgatattatggacagagcgagaaggatggtcaattcaaaagaagacgacagaaaatcggcgcagagcctgtaaaatgaaccggcctgggggcggcgccccgccggttttttattatgccgtttctccggatgtcatttcaccgtccatatcgggatgccagatataaggattttctcctttatcacgcgccatatcatatttaacgggctcaaaattcatcttatcccagaaatctgctgatttcatgcgtgaattcgtcctgatcggcattctgaaggattttgcaaaatcaacaagcgcttttccgtatccgttgttttgatagcccggaagaacctcaagcttccaaagttccaaaaagtcctgacggtgatcaaaatacggattcgcgcctccgtttacctgatataaactcattctcgccactagtttatccccgaagtaaatcccgtaaaaaggcgaggtgctgtcattttcaatgatattatcctgaagatcttcaagcatcgacagctcctgcatcccgtattccttaaaccttttaaattcttcgagtgtcttaaagttgatgagcagtcgctctattttcaacacaaactccccctttgttgtgttctaccattattgtaaacgctttaattgaaaattccaactataatatgcttgccagtctttttgctcaaaacgaaattgaagtaatttgcggcggcttctgctatgataatatggaaaaatgcagatatagggtgtgacagtgtgaaaatcggaattatcggcggcggagcggtaggccttttatgtgcttactacttatcgtcccgccatcaggtaacggtcattacgcggcggacggagcaggctgatgcgattaactcaggcggtatacggcttttgaaagacggaatagaatgtacggcggcatgcagagcgcaaacaggcatcacttccggattcgacctcttaatcgcagccgttaaacagcaccagctaagtgctgtgttgcgggatcttgagacgataaaagggacgaatgtgctgtttttgcaaaacggcatgggacacatacacgacattaaagattggcatacggatcattcgctttatgtcggcactgttgagcacggagcaaaaaagatatcagatcatgccgttgaacatacgggagcgggagccgtaagatggagtgtattcagcgcatcccggccggaaacgctccaaagcatcttttccggcatgcaccgggattttcccgtatatgatgaaaacgactggtatcggcttttaacgggaaaactgatcataaatgtatgcatcaacccgttaactgcattgctgcgcgtgaaaaacggagagctggtaacaaatgacgcttacaaaaaatatatgagaaacgtgtttgaagaagcggagacaatacttggcctcgccgatagagaaaaagcgtggaacaaggtttgcgaagtttgcagactgacggaaaaaaatcattcctccatgctcgtcgatatcatggcaggcaggcggacagaggccgatgcgattatcggctaccttgtaaaagaagcggaaagccgcggattgccggccgttcatctcccatttttacaccgcagcataaaagcgttagaaagaaactgaaacaaagtcttttgaggttttccggtaacatgctatactcatttcggaaacctaactatttattggagaaaggaagttccagacagatgcagctaactgaactttccatcaaaagtcaaaataagtttgtgcagcactatatagatggagaaaacatgtcttcattttttgattatgatattcattcagaggacgtatggcaaaagcggcttcatgacctgtcttcgcggccgtttgccagagaagaattagcggattatttatcctcctatcacgaaaaatttcactccgccgccatgcaggcctccatcgaaaaactgagagatccaaaaagcgcagcggtagtaggcggccagcaggccggtcttttaacggggcctctttacaccatacataaaattatctccattatcgtacttgccagacagcaggaagaggcgttgcagattcctgtcgttccgattttctgggtggcgggtgaagatcacgatctggaagaaatcaattttgtgcatacgtcaacagagaataaaggtccggtgaaacagaaactgccgcagtcgtactggaaaaaaacatcggcggctaaaaccgagcttgatcaggaaaaatgcgcggcttggattgatgaagtgttcgctgcttttgaggagacggatcacacaaacacactccttcaaaacgtgaagcgatgtttacgctcatcagagacattcacggacttttttgaactgttgatcgccgacttgtttcaagaagaaggccttattctgatgaattcgggagatccggggattaaaaagctggaaacgggtatgtttcagcagattttaaaacacaatcatgagcttgccaaagccgtgtcagaccagcagcgtcttatgcgggaagccggttatcacccgattattgaatcggacaaagatcaggccaatctgttttacgaacacgagggagagcgtttcttaattgaaaaagaaaacggcgtttttgtcattaaggagcttgatctgaagtggacgaacgacgagcttcatacccatatggaagaaaaaccggaatgtttcagcaataacgttgtgacaaggccgcttatgcaggagtttctcatcccgactctggcgtttatcgcgggaccgggggagatcaattattggggtgagctgaagcgggctttctcattaatgggctttcgcatgaccccggtaatgccgagactgaacattacgattttagagcgccatattgaaaagaagctttcagaacggaatatcccgcttcaggaagcgatcgaacacggcaccggacacctgaaagacacttattttgaagagcagattccggaagagttttcttctgtaatggaacaggcgaagtcgcagattgaagctgtccataaacgcgcaagggacgaagcgctgaaggtcgattcaagccttgagccgctcttacagaagaatgccgccttcattcaagatcagctcttgtttttagaacggacggtaacgaaaagaattgaagaaaaagaaggctttgtgctgcgtgactatgaaagaatccaaaacagcatcagaccgctcggcgctccgcaggaacggatttggaatgtgatgtattatctgaaccgctacggtccaaaattcttcacaaccttcaaacatctgccattttcttttcaaaaccaacatcagattgtcaaactttgaaataaagttttaaagaaccctgaatagttcagggtttttttttatgtgtaaacagtgtaaaatgaggttgtggagagaagtggcggatagtggtgagtttaggggagaaagtgggggtccttatcatgtttatgggtgaataccggcatactgttgatgcaaagggccgcatgatcgtacccgcaaaattcagagaaggcctcggtgagcagtttgtgctgacaagaggacttgaccaatgccttttcggctatccgatgaatgaatggaagctgattgaagaaaagctgaaggctctgccgctcaccaaaaaagacgcccgcgcatttacccgattctttttttccggtgcgaccgaatgcgaactggacaagcagggaagggttaatattgcgtcatctcttctgaattacgcaaaactggaaaaagaatgtgttgtcatcggggtttccaatcgaattgaattgtggagtaaggtaatatgggaacaatacacagaagagcaagaagattcattcgctgaaattgctgaaaacatgattggatttgatatataatggatcttcgtgcatcacaacaacaactgacaattcaattcatttctgataaaggtgggaccgacacaaatgtttcagcataagacagtacttcttcgtgaaaccgtcgacggtttaaatatcaaaccggacggaacctatgtggactgcacccttggcggcgccgggcacagtacatatttattgcagcaattatcggaaaaaggacgcttgatcgcctttgatcaagatgacacggcacttgaaaacgcaaagaaaacattgtccgaatacaaaggacagctcattctggtgaaaagcaactttcgttatttaaaagagtgtttacatgaacacggcattacgagtgtcgacggaattctatttgatttaggagtatcctctccgcagcttgatacaccggaacggggattcagctatcatcatgacgcaccgctggacatgaggatggaccagtcggccgcccttacggcgaaagaagtcgtaaatgaatggcggtatgaggaccttgtgaggattttctttaaatacggagaagaaaaattcagcaagcagatcgcccgaaaaattgaagaggcaagagaaaaatcgcctattcaaacaaccggccaactggtcgatctaataaaggacgcgataccggctccggcaagaagaagcggaggtcatccggccaaacgtgtattccaagccattcgaatcgccgtaaacgacgagcttcaagtatttgaagaggccctcttgcaagcgatagaggtgctgaagccgggcggaagggtgtctgtgatcacttttcactcgctggaagacagaatgtgcaagacgacattcaaggaaaaatcatcacttcccgaactgcctccgggtcttcctgtgataccggaagaatttgaaccggaattaaaactgattacaagaaagcccattacggcatcaaaagaggagcttgaagaaaataaccgcgcccggtcagcgaagctccgcattgcggagaaacgaaaataacgggcagcaaatgacaacattaaaggaggtcatcagcctatgagcaacttagcttaccagcaggaaaaacaacaacggccagtgataagtcccgaaaaaaaggtgattgtcaaaaagagggcttccattacactcggggaaaaggtgctgctcgtcctgtttgccattgccgttctctccacatcaatgtttatcgtatcaaaggcatacgcggcgtaccaatccaatattgaggtgcaacaactggaggagaaagtatctgagaagaataagcagatcggtgatctcgaaaagacggctgctgacttaagccagccgcagcgcctgatggatatcgctaaaaagcacggtttgaatctgaaagataaaaaagtgaaaaacatacaggaatgataacccatgccgaaaaaaaataagtttatgaacagaggagcagcgatactcagtatttgtttcgctctctttttctttgtcattctcgggagaatggcgtacattcaattaactggtaaagcaaacggtgtagaacttgcaacaaaagcgaccgagcagcacgaaaaaaagcggacgatagaagcgagccgcggctctattcttgaccggaacggcaaagtgcttgcagaggacacggcgacatataagctcattgccgtgcttgataaaaaaatgacaagtgatccgaagcatcctcagcatgtcaaagacaaagagaaaacggcggaaaaactggcgaccgttatcaatcttgataaaagcgagattctggacatcttaaacagggatggcgcgaagcaggtggaattcggttcagccggccgcgatatctcttatgcgaaaaaacaaaagatcgaaaaaatgaatcttccgggtatttctttcttaagagatacgaagcgctactatccgaacggcgtatttttgtcaaatgttctcgggtatgccgatgtgaatgaaaaaacaaacgagatacaaggctctttagggcttgaaaaaatactgaacaactatctgacggaacgcgacggatccgtcacttacgaaagtgataaatccggctggaaacttccgaacagcaaagaaaaaatcaccgcacctaaaaacggtgacaatgtatatttaaccattgatcagaaaattcaaacctttttagaagacagcatgacgaaagtagcggaaaaatataaaccgaaaaaaattatggcggctgtcgtagaaccgaaaacaggcaaagtgcttgcgatggggcagcgtccgagttttgacccgaatatcagaaacgtcaccaattattacaacgacttagtgtcgtacgcgtatgaaccgggttcaacgatgaagatctttacgcttgccgcggcgattcaggaaaatgtgttttctgcaaacgagaaatataaatcaggaacatataaagtgggaggcaaacctgttaaagattggaacgatggcgccggttggggtatgacaagcttccatgacggcctcatgaggtcatcgaatgttgctttcgccaaactggccaacgaaaaactggggtttgaccggtttaatgagtacctgcacaaattcgggctctatcaaaaaacagggattgatctgcccggtgaagtatcaagtaaaattaactacaaatatgattttgacaaagcgtctacggcttacggccaagcatcggcgataacgccgatccagcagcttcaggccgtcacggcgattgccaataacggcaaaatgatgaaaccttacgtcattgatcatattgtcgaccccgatacgaaaaaagtcgtcaagcagacaaaaccagagcaggcaggcacgccgatttcagccgatacggctaaaaaagtccggaatctgctcggagaagtcgtgacgtcagacatcggaaccggaaaaccttataaaattgaaggatttgacgtcgcgggtaaaacgggaaccgcacaaattgccgggacgggcggatatttaagaggaacgagcaactatgtgttttcattcatgggcatggcgccgaaaaatgatcctaagcttgtcatctatgtagccgtgcagcagccgcaattaaaagcggggcaaagcagctctgatcctgtcgcggaaatctttaacccgacgatgaaaaacagcctccactacatgaatatcgaaccgacggaaaaaacagattccggtcaggaagaaacgaaaagccaaaagatgcctgacctgacagataagacggtcaagagcgctgagaaggaagcgaaaaatgaacatctcacaccgattgtcatcggcagcgatgttgccgtaaaagagcagtatccgacagccggagaagatgtgatcaccaatcagaaaatcttcttaaaaacagacggaaagatgacgatgccggatatgtccggatggtcgaggcgggaagtgcttcaattcagcaaagtatcaggcattcacattgatgtgagcggtgaaggttacgcttcaagccaaagtgtgaaaaaaggcaaagaactgaaaggaaataccgtgatcaaggtgaaatttaaaaatcctgattaacgggacagagaagtccgcggatgcccgcgggcttcttttttatgcgccgccgttctatgtgtccaagctgaggcataaattgaaacaagcctaaataaggagtggacggtcccttgcgcgtttcaaatgtaacggttcgaaaacgtttattactggttttgctttttggcgtaatcatttttttgatcattgacagcagattaggctatgtccaatttgtgatgggagaaaagctgacttcactggctaaggattcctggagccggaatttgccgtttgagcctgagcggggagagattcttgaccgaaacggcgtgaagctggctactaataaaagcgcgccgaccgtctttgtcgtaccgcgccagatccaaaatcccataaaaacgggcaaacttctcgcgtcagttttaaatatgtcggaagagaaggtctacaaacacattactaagaaaacctccatagaaaaaatctcacccgaggggcggaaaatttccaataaaaaagcgaaagaaatcaaagcgctcgacttaaaaggggtgtatgtggctgaagacagcatccgccattatccgtacggaagctttttgtcccatgttctcggttttgccggtattgataaccagggtcttctcggtttggaggcttattatgatgatgacttaaaaggtgtaaagggatccgtgaaattttatacggatgccaaggggaagaaaatgcctgatgaagcggatgattacacccctccgaaagacggacttgatatgaaactgacgattgacgccaaggttcagacgattatagaaagagagctcgacaatgcagcggcgaaatataacccggacggaatgattgcggtcgcaatgaatccgaaaaacggggaagtgctcggcatgtcaagccgtcctgattttgatccggctgactatcaatcggtggatccgtccgtttacaaccggaacctgccggtatggagcacatatgaaccgggttcgacctttaagattattacgcttgcggcggctcttcaagagcaaaaagtaaacttgcaaagagaccacttttatgacaaaggatttgccgaggtcgacggcgcccgcctccgatgctggaaaaagggcggccacggttcgcaatcttatcttgaagtcgttcaaaattcctgcaaccccgggtttgtacagctgggggaacggctcggaaaacaaaagctgtttcaatatattaaggacttcggttttggaaagaaaacaggcattgatctgcaaggggaaggaacggggatcttattcccgcttgacagagtcggcccggtcgaacaggcgacaaccgctttcggacaaggggtttccgtcacgccgattcagcaggtggcagccgtttccgcagcaataaacggcggaacgctttatactccgtttattgccaaagagtgggttgatcccgttacgaaaaaaaccgttaagaaacaatcgccgattgcgaaaaggcaagttatttcccaggaaacgtcaaagcagatcagatatgctttagaaagcgtcgtcgctcagggaacggggcggaatgcctttgtggaaggatatcgcgtcggcggaaaaacaggtaccgcacaaaaggtgaaagacggcaaatatctcgaaaacaaccatatcgtctcctttatcggttttgcgccggccgatgacccgagccttgtcgtgtatgtcgcggttgataatccgaaaggcacgattcaattcgggggaaccgtcgccgcgccgattgtcggaaatatgatgagagacagtctgcctgagctcggcgtgaaaccgcgaaaaaatcaaatcgagaaaaaatatcaatggaacgacacaaaaacaatagaggttccgaatgttgtagggatgtctgtctctgatcttgagtcgctgcttgtcaatttgaatattgactcctcaggaaaaggaagcaaaattgtgaaacaatcacctgcagccggaacgaaagtaaaagaaggctcaaagatccgtgtttacttgagtgaagaatgagtctttttgaggcagccgattgttttcggctgcctcttatcataaagagaaaaaaagaagataacttttaagattaactggatgtatccttttatttacgctaaaatatgaactgtatgtttaaaagccattctgacttttataaacggttatcatgataaaagaatgaatagaatttctgagaggtttgatacaatgaaacttacaaagctgcttacatatttaatggccgaacctgttcaaaatgactttcatgaccctgacataacttcaattgagatggactccagggaagtgagaaaagggagtctttttgtgtgtataaaagggtatacggtagacggacatgattttgcccaaaaagccgcagaaaacggcgcagcggccatcgttgccgagaaagagcttgacgtcgatgttcctgtcattattgtccgccggtcacagcgggcgctcagcgttctttctgacgcgttttacgggcagccgacaaagcagcttcagcttatcggcatcaccggcacaaacggcaaaacatcaacgacgcacatggttgatgagattttcaaaaaagcgggaagacagaccggtttaatcggaacgatgtacattaaaatcggggatgagacattcccggtcaaaaatacaacgcccgaaagcgtcacactgcaaaaaacgttcaagaaaatgaatgatgagcatgttgacacagctattatggaagtgtcttctcacgctctgtcactcggcagggttcacggctgcgattatgatatcgccgtattcacgaacctgacgcaggaccatttagattatcacaagacgatggaagactacagacaggctaaaagcctcctgttttcccagctgggcggctcctttaatcacgaaaagccgaagcgggccgttttaaacgcagatgacaaagccagtgcttattttgaaaaagtgacggcggcgcacatccttacatacggaatcgagaatgatgccgatgtcatggcgaaacaaatcgagatctctgcgcaaggcacaagctttgaacttgttacgccaaaaggaacaaagcagatcacagtttcactcgtcggccgcttcaacgtgtataacgtactggctgcagcggcgacagcgatcgcagcgggtctgccgtttgatacgatcacaagcgctcttgaagagctgcaaggtgtcagaggccggtttgaactggtgaatcataatcagccgtttcctgtggttgtcgattacgcgcacacgcctgacagtctggaaaacgtcctgaatacatgcaaagacatgacagagggcaagcttttcgtcgtcgtcggctgcggcggtgaccgggacaaaacgaaacgcccgaaaatggcggaaattgcggtgcggattgccgacgaaccgattttcacttcagataacccgagaagcgaggacccgctggccatattaagagatatggaaagaggggtagaaggcacttactatcacagtatcgcaaatcgcgagcaggctatcttttttgccattgccaacgcgaaaaagggagatgtggttctgattgccgggaaagggcatgaaacctatcagcaaatcggcaatgaaacattcgactttgatgacgccgaagtagcgggaagagctattgttgagctgaataaaaagtaaaacaggaaagagtgttagaatgagggaaatgaaaagaattacggggacacaatgtgaatatgataaatacgtatgtcgtttgaacgaaacgggaggagaaaagagcaatgcttgagcaagtgattttatttacaataataatgggatttttaatcagtgttctgatatctccgattcttatcccgtttttaagacgtttaaaattcggccaaagtatcagggaagaggggccgaaatcacatatgaaaaaatcagggacgccgacgatgggcggggtcatgattattgtatccatcgccattacggcgattgtcatgacgcagaaattttcgcatctgagcgcggaaatgtttcttctgctgtttgtcacgatcggatacggcctgctcggctttctggatgactatattaaagtagtaatgaaacggaatctcggattgacgtcgaagcagaaattgatcggccagatcattattgccatagtattttacggagtatatcattattgccatttttcaaccggcatcagggtgccgggcacacatctgtcaatcgatctcggctggggatactttatcctcgttctctttatgcttgtcggaggttcaaatgccgtcaacctgacagacggtctggacggtctcttgtccggtaccgcggctatcgcattcggcgctttcgccatccttgcgtggaaccagtcacaatatgacgttgcgattttctcggttgccgttgtcggcgccgttcttggttttcttgtattcaacgcccatcccgccaaggtatttatgggggataccggttcgcttgcgctcggaggagcgatcgtgaccgttgccattctgacgaagcttgaaattctgctcgtcattatcggcggagtatttgttattgagaccttatctgttatcttacaagtcatcagctttaaaacgacaggaaaacgaatctttaagatgagtccgcttcaccaccattacgaattggtcggatggtctgaatggagagttgtcgtcacattctggactgcgggactgctgcttgccgttttaggaatttacatcgaggtgtggttataagtggaaaacgaactttttttgcaaaaacaaaactttctggtcctcggactggcgaaaagcggatatgcggctgcgtcgattcttcatgaaaaaggcattaacgtcgtcgtgaatgatcaaaaagcctttgaagagaacgaacctgcccaaaggcttgcagaaagaggaattgaagtcatctgcggtgagcatccgacgtcactttttgatcagcatcacattaccattctgatcaaaaatcccggaatcccgtatgaaaatatcatggtggaggaagcacaaagaagaggcatcccggtctggacggaaatcgagcttgcgtattatatcaccaatgcaaaattcatcggcattacaggttcaaacgggaaaacaacaacgacgaccctgatttatgaaatgctgaaagctgattcgataaagacgctgatcgcagggaatatcggcactgtcgccagtgaagtggcttatcatgctgacggtgatgaatggatcgtcacagagctttcttcgttccagctgatggggactcatgcattcagacctgaaatcggcctgattttaaatgtgttcgacgctcatttggattaccatcacagccgtgaaaactatgaaaaagccaagcagaacgtgtatcttcatcagcttgagagtgatacggccatcgtgaatcagagcgatgaaacagtcgtgcggcttgccgaaagcggaaaagccggcaccgttccgttttcagttcaccaggaactgtcaagcggcgcattcattaaagacggaatgctgatgttcggcgatgaagcgattctgcctgttgatgacatcgtactgccgggcgcgcacaatttagaaaatattttagccgctgtagccgcggcaaaaacggcgggcgcgtctaataaagcgattcagaaggtgctgacaagctttaccggtgtcaaacaccgtctgcagtatgtaactgcgatccagaatcgtagattttataatgacagcaaagcgacgaatattttggccacaagcaaagcgctctccgcgttcaaagcaccggttattctgcttgcaggcggactggaccgcggcaacggttttgacgacctgaaaccgtatatggacaatgtcaaagcggtcctgacgttcggacagacagcgccgaagatagaaaaactgggcaatgagctgggaatacaacatgtcaaacgtgtcgataatgttgaacaagcagtatctgcggcgtttgcgctctcaaatgaaggagacgtcatcctcttgtcacccgcgtgtgcaagctgggatcaattcaaaacatttgaagaacgcggtgacatgtttatagatgccgtgcatatgcttaagtaagggcttgtctctgttcatcggcagccctaaatgacttatgcttggggtgtcgattgctttgactactaaaaaaacagcgcctgatttgttattagttatcattacgttattgcttttaacaataggattaattatggtctacagtgcaagtgcggtatgggcggattataaatttgacgactcgtttttcttcgcgaaacggcagctgctgtttgcggggatcggcgtcattgccatgtttttcattatgaatgtggattattggacatggcgcacatggtcgaagctgcttctgatcatttgtttttttctgcttgtgcttgtgctgattccgggagtcggaatggtgcggaacggttcaagaagctggatcggagtgggagcgttcagcattcagccttcggagtttatgaaactggcgatgattgcgtttctggctaaatttctttctgaaaaacagaagaatattacgtcattcagacgcggattcgttcccgcgctcggaatcgtgttttctgcatttattattattatgtgccagccagacctgggaacggggacggtaatggtgggcacgtgcatcgtgatgatttttgtttccggtgcgcgaatcgctcattttgcgttcctcggactcatcggtttaagcggatttgcggcgctagttctgtccgctccttatcggattaaacggattacctcttacttaaacccgtgggaggatccgcttggaagtggatttcagatcattcagtcgctctatgccgtaggtccgggcggactgttcgggatggggctcggccaaagccggcaaaagtttttttacctgccggagccgcaaaccgatttcatttttgctattttatctgaggaactcggctttatcggcggttcgctcatattgctgctgttcactattttattatggcggggcgtcagaattgccctcggcgcgccggatttatacggaagctttgtcgccatcggtattatttctatgatagctattcaagtcatgattaatatcggcgttgtgacggggctgatcccggtaacaggaattacgctgccgtttttaagctacggaggctcatcactgacgctgatgctcgcagcggtcggcgtgcttttaaatgtcagccggtactcgaggtattgatctgtatcttgcctcatcactcatgatttattcgttatctataaaaaaacagacaacatcaataaccctgtcctaaaaaacagggttatcgctatgtgattaagggggacatacgaatgcgtattgcagtaagcggaggcggaaccggaggacatatttatccggccctggcctttattaaagaagttcagcgccggcatccggatgtggaatttttgtatatcggaacagagaacggtcttgagaaaaaaattgttgaacgggaaaatattccgttccgcgccattgaaattacaggtttcaaacgaaaactttcttttgaaaatgtaaaaaccgtcatgcgcttcttaaaaggcgtgaagaaaagcaaatcatatttaaaagagtttaaaccagatgccgttatcggtacaggcggctatgtatgcggtccggtcgtatacgcggcggcaaaaatgggaattccgacgatcattcatgagcaaaacagcctgcccggcatcacaaataagtttctctcgaaatatgttaataaggtagcaatttgctttgaagaggcaaaatcgcattttcctgctgaaaaagttgtgtttacgggaaacccgagagcctctgaagtcgtctcaattaagacaggccgctcattaactgagttcgggctgaaagacaatcaaaaaacggtgctcattttcggcggaagcagaggcgcggctcccattaaccgtgccgttatagatatgcaggaagaattgaaaacgagaccttaccaagtgctttatattaccggggaagtacattacgagaaggtaacggctgagctgaaaggcggaaaagccgctgataatatggtgacaaaaccgtttttgcaccaaatgccggagtacttacaatcaattgatgtcattgtggccagagccggagcgacgacgattgcggagatcaccgctctcggcattccgagcgtgcttattccgagcccgtatgtgacagccaatcaccaggaagtcaatgcgaaggcgctcagccagcatgacgctgcaatcgtactgaaggaaaccgagctcagcggagaaaaactgatcgctgcgctggacaaaatcgtcatgaatgaagaaaccttaaaagacatgagtgagcggacaaaatcactcggtgttccggatgcggcagccagactgtacagtatcatggaagacataaaaaaatagagcaaatggaatgcggaggtttatgatggagaacgtaattcaggaattaagagaccgcgaagtcggcaaagtgctggaacaagaaccgctcgcgaaccatacaacgatgaaaatcggcggtccggcggacattttgatcatccccaaccgtgtggaagcggtcaaagatatcatggatattgtgaagaaacatgatctgccatggacggttatcggccgcggttcaaatctgctcgtgcttgatgaaggcataagaggagttgtcatcaaactgggcgcgggtctggatcatttggagattgacggtgatcaggtgacggtcggaggcggctattcggtcgtccggcttgcgacttccatgagtaaaaaaggaatgtccggtctcgaatttgcagcgggcattcccggatcaatcggcggagccgtctatatgaatgccggggcgcacggatctgatatgagtgagattcttgtgaaagcccgtatcttatttgaagacggcacaatcgaatggctgacgaacgaagagatggatttcagctacagaacgtctgttttgcagaaaaaacgtcccggcgtctgtctcgaggcagttcttcagcttgagcaaaaggaacgggaagccattacggcgcaaatgcagcagaacaaagattacagaaaaaacactcagccgtattcaagcccatgcgccgggagcatattcagaaatccgctgccggatcatgccggaaacctcgttgaaaaagcgggattaaaaggacatcagatcggcggagcgaaagtgtccgaaatgcacgggaattttatcgtcaatgccggcggagcgactgccaaggacgttctcgacctgattgaatatgtgaaaaagacaatccgtgagcagtatgatgttgacatgcatacagaagttgaaatcatcggagggaatcgttaaaaggttctctgattacatgagctcatgtgatatacttttaacaaatgtcaaacggcatcacagcatgccgtttgtttttcaatcagacgaatgtcaagctgtttcattcttagtgaggtggacaggcagtgaacccaaatcatgaaagagaaaaaattgtaaatattgaagagcggattccgaaaatcaaagagcagcggaaacaaaaagcaaaccgccggctgatttcattcattgtgctcttttttatgatggtgctgatcatcgtgtacttgcagatgccgatcagcaaagtgtcttctgtcaccgtttccggaaacgaaaacgtgtctgtaaaagagatcaacgcgctttctgatatacataacggacaaaccgagttctggagtctgaacaagaaacaaacagaagaaaagattgagcagaataagctggtgaaaaaggcggaactttcaaaagtatttcctaacaaagtcagcattcacattgaagaatacaagacgatcgcgtatctgcagcgacatgatgtatattatgaagtgctcgaaaacggcactgtgctgccgaacgaagtcacgccggatgacgcgggcccgattttggttgactggacaaacgcgaaaaagcgggtcaaaatggcggagcagcttgataagctttccggttcgctaaagcagtcgatttctgaaatctattatacaccggtaaaaatggatcaggaccggatcaagctgtatatgaacgacgggtatgtagttaccgcttctattaaaacgtttgccggccggatgaagacctatccttctatcgtttcccagctggacggcgggaaaaaggggattatccacttagaagtcgctacgtattttgaagaatttaacaaaggtaaatccggcaagaaaaaagaaaatgattaatagttctaaagaactaatttcaaggtggttcaaaagaatctattacaatcagcggggcagccgatataaccgatagcggaatcattatgactatgtttgtttttgcccgggatatggctgccggacaagcggaaaattctcaatgcaatgggcgtgtcttctgcaatgagcattgcatttggaattttcctcctgtttcttcttttttcggatgtttctggcaatatctatagcttttctggaggttcatcttagtgtagactaatggaaagcgggtatatttgcatctggtttgcacagtatggcaccgtgacaggaaatcttacggtaaggtgggccgtctctaaaaaaaataaaaaaaatacgatataaaagaggatatacatagaatataacgaatagtttcattaaacataaattgtgagaaatcagataagaatttgttgatgctgttgtttttgttacacacttgtaaagccacattcattgtattgttgttccgcaaataatagaatagaatttgatcgaaatgtgaggaggtgccatagaatgaacaacaatgaactttacgtcagtcttgacatcggtacgtccaatacaaaagtgatcgtcggagaaatgacagatgattcccttaacattatcggagtgggaaatgtaccgtctgaagggttgaaaaaaggctcaatcgttgatatagatgaaaccgttcattctataagaaaagcgtttgaccaagctgaaagaatggtaggttttccgctgaaaaaagccattgtcggcgttaatggaaattatattcatattcaagatacgaacggcgttgtcgctgtttccagtgaaaacaaagaaattcacgttgaagacgtccgcagggtaatggaagcggcacaggtcgtgtcagttccgcatgagcagctgatcgtagacgtcgttccgaaacagtttatcgttgacggaagagacgaaattaccgatccgaaaaaaatgctcggcgtgcgcctggaagtagaaggcacgctgattaccggctccaaaacgatcttacataacttacttcgctgtgtggagagagcgggcgttgaaattactgatatttgcctgcagccgcttgcggccggttcggcggctttgtcaaaagacgaaaaaaacctcggagtcgccatgattgatatcggcggcggctcgacgacggtggcggtatttgaacaggggcacctgaaggagacagccgtcattccgctcggaggcgaaaacatcacgaaagatgtatcgatcggattgcgcacttccaccgaagaggctgaaagagtaaaaaaacaattcggacatgcattctacgatgaggcttcagaagatgaagtatttgaagtcaccgtcataggaacgaatcaaaagcaatcttttacacagcaggaaattgccaatattattgaagcaagagtggaagagattcttgagattgccgcagccgaaattgagcatatgggaattacagatctgcccggcggctttgtgctgaccggcggacaggccgcaatgcccggagtgctttcattggcacaggaagtgctgaggcacaatgtaagggtcgcaagcccgaattatatcggtgtaagagaccctcagtatatgacgggtgtcggcttgatacaatttgcctgccgaaatgccagaattcagggaagaaaaataggctttcatatgccggaagaagccgtgcaggaaatcgcggtctctcacgaagaagaacatcatcagcggccagaggcgcagcagcgtccaaaagcaaaacaaaaaacacaagccgaacacaacaaaccgagcaaaatgaaaaaactattaagcatgttttgggaatagattgatagtcattcggcagattaggaggatttagcatgttggatttcgaaacaaacatagacggcttagcatcaattaaagtaatcggagtaggaggcggcggtaataacgcggtcaaccgaatgattgaaaatgaagtgcagggtgtagagtacattgcggtaaacacggacgcgcaagctcttaacctgtcaaaagcggaagtgaaaatgcagatcggggaaaagctgacccgcggtctcggagcgggagcgaatccggaagtcggcaaaaaagccgctgaagaaagtaaggaacaaatcgaagaagcgctaaaaggcgctgacatggtgttcgttacagccggaatgggaggcggtaccggaacgggagccgcaccggttatcgcgcaaatcgcaaaggacttaggcgctttgactgtcggtgtcgtaacaagaccgtttacatttgaaggaagaaaacgtcagctgcaggctgcaggcggtatcacggcaatgaaagaagccgttgacacactgatcgttattccgaatgaccgcattcttgaaattgtcgataaaaacacaccgatgcttgaagcattccgtgaagctgataacgtgcttcgccaaggggtgcaaggtatctctgacctcatcgcgacgcctggtttaatcaacttggactttgccgatgtcaaaaccatcatgtccaacaaaggttcagcattgatgggtatcgggatcgctacgggcgaaagccgtgctgctgaagccgccaaaaaggcgatctccagtccgttactggaagcggcaatcgacggagcgcaaggtgttttgatgaacattacgggaggtacaaacctgagcctctacgaagtgcaggaagcagccgacatcgtcgcttctgcatccgacccagatgtcaacatgattttcggttcagttatcaatgaaaatctgaaagatgaaatcgtcgtcaccgttattgcgaccggttttatcgaacaggaaaaagatgactcaaaaccgcagcgaccgactttaaaccaaggattgaagtctcaaagtcaaaacgctgcgaaacgtgagccgaaacgagaagaaacacagcatcaaaacacggtgaaccgccatacatcacagccggcggatgatgccctcgacattcctacatttttaagaaaccgcaacaaacgcggctgatgtaaaaaaggacaagaccacatggttttgtcctttttcttttttgtgtacagtcttccttcctatccccataatctatacagtgaaaaaagcaactttatacctatgacgaattgattgttttttagtttcatacggctttctacagaatgcgacaatatctggatggaagattgtctacatttaacgtacagcatcgaaatgacaaacgattccaattatgaaggagggatacacattttatagggcgttaccaaataaggggggatacgattgaagaaaaaaacaagaaacagatggacaggctccgttttaagcgcgattgtcgtcagttccctgttgtttccgggtgcagccggagcgaacagcacaccgggggcagtttctttcaccaaagatctttcttcctctaagagcattcagcataagatttccgattcagtcaagaagcgttttgaaaaaaatgataaagtcacgtttcttatcaaatttaaagagaaagccaatacgaaaaaagcggtcaaagaagcagaaaaaaacgccaagtctcaatcgctttccgcagcaaaaaacgaatatcaaaagcggtcagccgtcgtttcttctttaaaactggcggctcatgatgcgcagcagaatctgaaaacatatttggaaaaacaaaaaaagaaaggcaaggctgatcacatccattcctattatattgttaacggaatggcagtcactgcttcgaaagaggtaatggaaaaagccgcctcatttcctgaagtagaaaaagttcttccgaatgaaaaacgtcagcttactcaacgacaatcaaaagctccttttcaaatgaagaaaaaacaaaaagagatcaaagcaaaggaaggcatcgaatggaatatcagccaaattgatgcgccgcaggcctgggcctcaggatacgacggaaccggcacggttgtcgcctccattgatacgggagttcagtgggatcatccggcgcttaaagaaaaataccggggttacgatcctgaaaatcccgcagcgccgaatcatgaaatgaactggtatgatgccgtgtcccataaagacgctccctacgatgatcttgaacacggcactcatgtaacagggaccatgacgggttcagaacctgacggctcaaatcaaatcggtgtggctccgggggcgaaatggatcgcagtaaaagcattttcagatgacggaggaaccgatgccgatattttggatgccggtgagtgggtgctcgcgcctaaagataaaaacggcacgccccatcccgagatggcgccggatgttgtcaataattcctgggcaggcggttcgggaatggacgagtggtaccgcgatatggtgaatgcgtggagagcggcagggatttttccggaattctctgcgggaaatgaagacttatttacaccgggaggaccgggttcaatcgcaaacccggccaattatcctgaagcatttgcgacaggtgcgactgacatcgacaagaaactcgctgatttctcacttcaaggcccctcaccgtatcatgaaacaaaaccggacatttcggctccgggagtgaatatccgttcttcgattcctggaggaacatacgaaggcggctgggacggaacttcaatggccgggccgcatgtggcggcgacggcggctttgttaaggcaggcgaacgcctctattacggtcgatgaaatggaagacgttttgacgcgcaccgcggaaaagctgacagattccgtttttccggaatcaccgaataacggttacggccacggtctcgttaacgcttttgatgccgtttctgccgtaacggacggaatcggaggcgtagaaggcaaggtctcttctgcgggcgaagatcacaatccgcccagctttcaccatgaaccggtctcagcggcttacaaaggggcaaaccttccgttaacggttacagcagaagacgatgtaagcgtaactgaagtcatcctttcctatcagtttgatgaaggaaagtggaaaacgacagctgccgttcaaaaaagcggtgatgaaaaaaagggaacataccaggcggagattccggatgtaacgggaagcaaggtaagttataaatggaccataaaagatttcggaggtcattctgtagaatctgatacgtaccgggctgacgtgaaaccgagcattacggcgggatacaaagaggattttgaatcacagccggcgggctggtccagttacgggacacatgaccaatgggaatggggtatcccgggttcagggcccggcaccgcattttccggagataaagtgtatgcgacgaatctgtccggcccttatgccgattcagccaacatgaatttggtgatgcctccgattcaagttccggaaacaggacggctgtttttgcaatttaaaagctggcacaagctcgaagaattttttgattacgggtatgtgttcgttcttccggaaggaaaatcacattgggagcaggcggccgtttacaatggtgactccgcaggatggaacgatgaagaggcagatttatctgcgtataaaggccaaaacataaagctcatgtttaatatgcagtcagacgaagtactcaatgaagacggatggtatatcgatgatgtccggctttcaagcagccctctcggcaaggcggctaaaaaaagtaaacacaatagacaaacacctcccggccacctgaagaaaaaagcagtcagtccgaaacaggccaaaccggcagtgaaatcacccggaaaaagagtaaaacgtgaaacaaacctcctgcctctcagagcgcaaatcagtgtcgccgagacggggaaatccgtatattccgaccctgcaagcggaagctacagcctgtcgcataaggcgggaagctatacgctgaaagccgaggcttacggatttaagtccgcttcgaaacaagtttctattcaatcagacaaaaccgcacaggcagactttacactggagcaaatgccgtccggcacgctaaaaggaaccatcaccaatcagtcaacaggcgaaccggtaaaaggggctgcgctttatgtggctgaggatgccgcaattgaaccggcggtgacaaacgataaaggggaatattcgcttaaggcgtacgaaggctcctacacaatcaaagtagcggcaaaaggcttttacaatagcgaattttccgttgacatcaaaggagatgctgaaaaaaacgtcaagcttaagccgtatatcggttatgaaggggaaattgcatatgataacggaacggaagaagccgcgctgtcatattttaaagccggcagcaaatctgccgttaagatgacgctcaaagacggaaaagaacacggtatgctgacgggaggcctttttaaattttggggcgccgactggcctgatccgggcggtaccgaatttcaagcagaagtatatgatgcatccggccctgatggagctccgggcagcaaaattgccggcccgttccaagctgaagcgcttcgaaacggcgaatggaccaaagtggatctcagctcaaaaggaatcgcggtcggaaaggatttttatcttgtgttccgccagacgaaacccgatccttatacacctgccctgtcatctgatgacggcagtccgtactcgaacagaaactggcaataccttgacggccgctggtcaaaagccgataaatcagacggaaactttatgatcagggctttggtcgactacgaagcttctgtgccagaaataacgtcgcctgaagaccggtcatttacaaacaagaagtcaatcacggtgaaaggaacagcttcaccaaaaaccgctgtccgtcttaccaataacggtaaaaccgccgcagaaacgaaagcagatgcagacggcaatttccaggccggcgtcacactcactgaagatgccaatcggctgacggcggcatctgtgacagacagcgggtcaaccgatgagtcacgccctgtcacggtcatactggatgaggataagccggatgtgacgattgacagtccggcaaacggtgataaaacaaataaagaagcagtgaccgtaaaaggaaaagtgcacgacacccatttaaaatgggtaaaggtgaacggaaaaaaagctgaagtaaataacggttcttatcaagcgagaactcttctggaaaacggcagcaatgagatcaaggtcacggcctcagatgaagcgggtaacaaaacaacgaaaaagacggtaatcgatgtcaattacaatgctcccgtcatttccggattggttcccggagcggataaggaattaaaagccggagaatcagtgaaaatcgctttttcaagcggaaagaaattagacgcttccttcgttatccgtctgcctctgacaaacgcccgggcagggagccaaaacgcaacagagcttccgctgagagaaatttctccgggacgatatgagggttactggacggcgacttcttccatcaaagcaagcggagcaaaaattgacgttatcgctagagatgactacggaaatgaaacgagacagacggctaaaggaaaactttatatcaatgagtaaaacagagcgctgccagatcacggcagcgcttttttagttgaagcggacaataggaaagcaaccctttcggccctcgacaaataaaacggttatcccttaaaaattgtactttaccctcaacattaattgacagactttcccacagagcttgctttatacttatgaaacaagagagagatacagataagtaagacaaaagaggaaaggggtcagatgtgaaaatctatctggatgtcatttggctgttgaacttttgttttgattctcttttgcttttattgaccgcctttattttaaaacgccaggtgaaaaaaagaagagtggccgccggcggtttcatcgggtcagccattgtgcttctgatgtttacgcctgtttctccctttgtggagcatccggcgggaaaaatggcgttttcagtagtcatcgtgcttgcggcttttggctttaaacggttccgatacttttttcaaaatttgttcgccttttatttcgcgacttttctcgtcggcgggggaatgatcggcgtacattccctgctgcagacagaatcaattgtgcagcaaggcgtaatggtcacaagccagaccggattcggcgacccgatcagctggatgtttgtagttatcggatttccggccatatggtttttttcgaaaaagagaattgaagacatcgagacgaagtccattcagtacgatgaacttgtcatggtgcaggcggaattcagcggacagacaatccgcgcgaaaggattggtggattccgggaatcagctgtatgatccgctgacgaaaacgccggtcatgatccttcacattgacaaattcgctccgattctcagcgaaaaggaaacggccctcatcaaatccgccagtccgcttgaagtgatagagcagcttgatgattcgttccgccatgcggataagctgaggctgattccgtacaggggcgtcggccaggacaatcaatttttactctgtttaaagccggattacgtcacgattttaacaaaagacgaaatgatcgcttgtgaaaaatgcctgatcggcatcagcacgaaaccattatccgcggacggtgaatttgacggaatcgttcatccgaagatgctgacagggaaggctgtaaaacatgtttcctgacgaaaagtctgttattcatcatactcaaaacgcgttgtatttagaagggggaggaagatgaaaaaacttaagctgcgtctgacatatttgtggtataaatggctgatgaaactcggactgaaaagcgatgaagtgtattacataggaggaagcgaggcgctgccgccgcctttgtctaaagaagaggagcaggtgctcttattaaagctgccgagcggggatcaggcggcgcgggccattctgattgagagaaacttacgtcttgtcgtttacattgcccgcaaattcgaaaataccggcatcaacatcgaggacttaatcagcatcggcaccatcggtttgatcaaagcggtaaacacttttaatccggaaaagaaaatcaaactcgccacctacgcgtcgcgatgtatcgaaaacgaaattttaatgtacttgcgccgaaacaataaaatccgttcagaggtgtcctttgatgaaccgctgaatattgattgggacggaaacgagctgctgctttcggatgtgctcggcacagacgatgatattattacaaaagacattgaagccaatgtggataaaaaacttttgaaaaaagcgcttgagcaattaaacgaaagagaaaagcagattatggaactgcgtttcgggcttgtcggagaagaagaaaaaactcaaaaagatgtagccgacatgatggggatttcacaatcttatatctcccggctcgaaaagcggattatcaaaagactgagaaaagagtttaacaaaatggtgtaaaattttttccaactgacagcccttactgctgcaaggattgccgcagccggatgtttatttctgtaaaatggcggtgcatatttttcccacccgaggagatacttaacgttgtacagcagctcctagtgggagggaaaaacgtgtcaagaaataaagtcgaaatttgcggggtggatacctccaaattaccggtgctcaagaatgaagagatgagaaagctgtttaggcaattacaggatgagggcgatgattcagcgagggaaaagcttgtaaacggcaatctgcgccttgtcttaagcgtcattcagaggtttaacaacagaggagagtatgttgatgacttatttcaggtcggctgcatcggactaatgaaatccattgataattttgacctaagccataatgttaagttttcaacatacgctgtaccgatgatcatcggagaaatccgcagatatttgcgggataacaatccgatccgcgtctcgaggtcgcttcgcgatatcgcatataaagcgcttcaagtaagagagcggttaatcagtgagacaagcagggagccgacagcagaggaaatcgccaaagttcttgaagtgccccatgaagaaattgtgtttgcccttgacgccatccaggatccggtttcactgtttgagccgatttataatgacggcggcgatccgatttacgtgatggaccagatcagcgatgagcgcaataaggatacacaatggattgaggagctcgctctgaaagaaggcatgagaagactgaacgaacgggaaaaaatgattttgcgaaagcgctttttccaagggaaaacccaaatggaagtcgctgaagaaatcggcatatcccaagctcaggtctcaaggcttgaaaaagcagccattaaacaaatgaataagaatatccatcaataacggaaaaagcctttaaaccttgtttaaaggcttttttcatgcgatggtttacgtttgcaaaaaagtgatgtattctaatgtgtaaaagtttttagaaaatttaaacaaagtaaacgggggaaactgcaatgattttacagctggacagtgtgtcattaaaaagaaacgggaaatggattttgaaagatatcaactggcgcgtcgagaaaaacgaaaattgggtgctgtacggattaaacggagccggaaaaacggctttgctgaatatgttatgctcttattacttccccacttcaggagagatgcaggtgctcggccatcaattcggcaaaacagagctcggtgacaggctcagaaggaaaatcggtcttgtttcggcaggtcttcagcacaaattatatgccgcggactccgcttttgaaatcgccctcagcggcgcgtacgcctcaatcgggctgtacgcaactccgagtgagcaggtaagggaaaaagcgatcggacttctgaaggatttgggcgccatcggttacgccgacagacggtatgaaacattatcacaaggggaaagacaaagagcgctgattgcgcgggcgcttatggctgatccggaactgctgattctggacgaacccgtgacgggtcttgattttatggcaagggagcagctgctggacacgattacgtcgatcgccgaaaaagaaaatgcgccgtccatcctttatgtcacccatcacgctgaagaaattctgccggtatttgatcagacgctgcttttaaaacagggcgaggtgttcgcctccgggaaaatcagggacatgctttctgacgagcggcttacagcgtttttcgatatgcctgtcaatgtcttatggaacaatggccgcccgcttttaacacgtgcaaaagaggcatcatctgtaaaataacataaattcaccctgggggtgctgccatgcggctgagagagacgtttgtctcaacccttaacggacctgatccggatcatgccggcggagggaagcggtgaaaaaagcggaggaagatccgttttttacccgtttcatttcatgaatgaaacgggttttttgatacagccaaaggggagatttccaatgcatcagattgatatgctgttacaccaggcggagaaacggcggcacgacttcatacatattgctgaaagactgatagcttttcccactccggccccgccagcaagaaatacggcagaagcccaaaagtgggtggccggatttttaaaagaaacgggctgctcggtcgatatgtgggatgtgtatccggaagatccgaatgtagtcggtgttttaaaagggacagattcaagcaggcatcaaagcctgattttaaacggacacattgatgtggcagaagccgggggcgaagactggcactctgacccgtttcagccgcacgtaaaagatggcatgctgatcggaaggggtgccgctgatatgaaagggggtttggcgtgtgttcttttctctctgaagctgatccatgatgccggcattaagcttccgggcgacctcattgtacagtctgtaatcggagaagaagtcggtgaggcggggacgctggaatgctgcaaacgcggctatcacgcggattttgccgttgtcgcggatacgagcagcctgcatattcaagggcagggcggagtcatcaccggctggatagaattgaaaagcaaacaaacatttcatgacggcatgaggcgcaatatgattcatgcgggcggaggcacattcggagcgagcgccatcgaaaaaatggcgaaaatcatcactgccttgggagagctggagcgccactgggcggtaacgaaaagctatcccggttttgcgcccggcaccaatacgatcaaccccgccgtcattgaaggcggaagacacgcagcgtttgttgccgatgaatgccggttatggatcaccgtccacttttatccgaacgaaacgcacgaacaagcagccgcagaaatcgaagactatattaatcgtgtcgctgacagtgatctgtggctcaaagaaaacaggccggtgttcaaatggggcggatcttcgatgattgaagacagaggagaggtgttcccggcgctggaaatcgacccggatcatccggcagtttctgtcttggctgcatcacactcagccgtcagaaaacaggagcccgtcattgatgtttcccaaaccgtaactgacggagggtggctttatcatgccgggattccgagcgtcatatacggtcccggcgatttaaaaaacgcccactccgtaaacgaggaagtgtccgttgatgagcttatggactatacgaaaattatgctgagatttatcctcggctggtgcagccgcaaaaaagattgcccgatgtgacaaggttcagcccggccgttcatataataggaaaaagaacgggcaaagggcgtgatacggatgatcagcatatctgaatttcaaataaaagatgtggtaaacgtgtcgaacggaaaaaaactcggaagcatcggtgatattgatattaacgtgacaacgggaaaaattcaggcgattattttaggcggcagcggaaaagttctcggttttttcggaaaagaagaggaaatgatcattccttggcgaaatatagttaaaattggggaagatgtcatcttagtgcgtgtaaacgaaccaaaggggggagcgtaatcctccctttacttgtaaaaagccggaaatctcaatgtttccggcacatttatttatctcatttttcaatcagccgctaaacgtatgctcaaaattgtgttaaaatgagtgggaaattacgcttttttaatgtttgtcgaaaggttggatctccatgaatacatatcacccgtttagtcttaccaccccctcggcactcatgatagaagactggaactgtgtgaatcagcttaacacaaaggtcatcgccggattcacaacgaaaaacggcggggtcagcaatcctccgtatgagtcattaaataccggattgcacgtccgggacgaagctcatgatgttgtgacaaaccgtgaagtcatagcgtccttatgcggtactgatctggattcctgggtgttcgccgaccagacacatgaaaaccgcgtccggcgcgtgacagccggggataaaggaaaaggagcgagagactattcttccgcattccgcgggacggacgggctctacacgaaagatgcgaatctttttttggccctttgttttgcggactgtgtgcccttgtatttttatgacccggtgaaatccattatcggcgctgcccatgccggatggaaggggacggtcaaacaaatcggacgcatcatgacggaacgctgggtaaacgaagaaggctcccgtttaacagatattcaggctgtcatcggtccgtccatcagcgcgggaagctatacagtcgacgaccgcgtcatcaatgaagtgcgggcgctgccttttacggctgaatccgccatatgcgaaacggaaaaaggccagtatcagcttgatttaaaagaggtcaaccgtcttcttctgatacattgcggcattccggaagaaaacatttcagtcagcggtttatgcaccgaacgagagcgtgaactattcttttcacaccgccgcgacaaagggaaaacgggacgcatgatgtcctttatcggaatgaaggaggcgtaagatcttgcgtgttgctgatcaattacgacatataaacgaaagaataaacgaagcatgtaacagatcgggccgaagccccgaagatgttaccgtcatcgcggttacaaaatacgtatcagccgaaagggctcaagaggccgttgatgccggtattacaagtctgggagaaaaccgggatgccgagcttatccataagcaggaagtcatcaaaggcagcccggagtggcactttatcggcagtcttcagtccagaaaggtgaaggccgtcgttgaccgtgtatcttatattcattccttagacagactgtcattggcaaaagagattgaaaaacgggcgcagcatgcggttcgctgttttgtgcaggtgaatacttcgcttgagccgtctaagcacggtttgaaaacagaggaggtcatcccctttatcagagagctttctgagtttagaaacatttctgtagagggcctgatgacgatggctcccctgacagacgatacagaaacgatcagagcctgcttccggcaattgcgtgatctgagggatcaggtgcaaaaactgcatcagacaaacgcaccgtgccgggaactgtcaatgggcatgtcaaatgattatgaaatcgctgttgaagagggcgcaacttttatcagaatcggctcttcattagtcggaaatgaaccggggggtgtaaacaaatgagcatgaaaaataaactgaaaaactttttctcaatggatgaggaggagtacgagtacgaatacattgaaacggagcaggatcatccggaagagcatgaacagcagaaagataaacagcctgcttacgctcagaagccgcagggcaagcagaacgtagtaagcttgcaaagtgttcagaaatcctctaaagtggtgttgagtgaaccgcgtgtatatgcggaagcgcaggaaatcgccgatcatttaaagaacaggcgggcggttgtcgtcaatctgcagcgcatccagcatgatcaggcgaaaagaatcgtcgactttttaagcggtaccgtctacgccatcggcggcgacattcagagaatcggttcagatatttttctgtgcacgcctgataatgtcgacgtttccggcacgatttcggagcttataaatgaagacgaacatcagaggtggtaaagcaggatgattctttatcaaattttttccgttctgagttatttaatttacatctactcgtttgccctgatcatctatatctttatgtcatgggtgccgagtacgagagaaacggcggtcggacggtttctcgcagcgatttgcgaaccgtatttagagccgttcagaaggatcattccgcccattgccatgctggatatatccccgattgtagcgattatcgtgcttcggtttgccacgacgggactttggggcctataccgcatgatcgcaatgtatacttgaatgcgacagtttgatacgggcttggcaccagccaagcctctttacatagaaaggaaagaacatgagcgatatttaccagcacttcagacaagacgagcggccttttattgatcaggcgcttgaatggaaacagattgtcctggaccagtatcggatgaagctgactgatttcttagatcccagagaacaggtcattgtaaaagccgttatcggcgacgcctgcggtcttgcgtttttcggaggatatgacagagctgagcgcaagcgcgcgattttataccctgaatatatggaacctgaacaggatgattttgagcttcgggcttttgacgttcaatacgctgaaaaattcgtcagcattgaccaccgctctcttctcggatcattaatggggatcggcttaaagcggcagaaatacggcgatctgattttctctgaggaagccgtgcagctgatcgtctccggtgaaatcgccgattttgtcagcactcagctgaccaaggcgggcaaagcgccggtaaagcttgagaaaatcgagctttccgctcttcacattcccgcttcagatgtcgaaataagggatgacacggtttcttcattgcgtctcgacgccgtctgcgcttcaatgagcaggcaatccaggcagaaagcgcaggcgcttgtgaaaaacgggctcgttaaggtgaattggaaagccattgaagatccgtcttatcaggttgctgaaggggacatgctttcgattcgcggcttcggacgatgcagtttggcaaaagttgacggaaaaacgaaaaaagacaaatggaaagttacatttgaacggcaaaaatgagtcgttttttcagtttttttctccatctgtgccgtatttgttttataatgtgaactagataaccgtactgaaatgtaaaaatggaggtggcaatatgccattaacgccgaatgatatccataacaaaacgtttacaaaaggttttcgcggatatgatgaagatgaagtaaatgaatttttaatgcaggtcagaaaagattacgaaatcgcactccgtaaaaaaacggagcttgaggcgaaagtgaacgagctggacgaaaaaatcggccactttgccaatatcgaagaaacgctgaataaatcaattctcgtagctcaggaagccgcagaagacgtaaagcgcaactcgcagaaagaagcgaagctgatcgtccgtgaagcagaaaaaaatgctgatcgcatcatcaatgagtcgctttccaaatcaagaaaaatcgcaatggaaattgaagagctgaaaaaacagtctaaagtcttcagaacacgtttccaaatgctgattgaagcgcagctcgacctgctgaagaacgatgattgggatcatctgctggaatacgaagtcgacgcggtatttgaggaaaaagaataattttctgattttcttgacattctccggcccgttcgaatataatacgttcataaattcagatgaaaagacgattgaaagggaccggcatgactcaaaacaggctataaagcgacccggggaaggtgaaagcccgggatggccggaatcatgcagatcagccctttagtttcctttctgaaccgagagtaggaaaggacgttccatcacgttacgatgttcgagaggaaaagacggatgatccgttttttctaaaagggtggtaccgcgagataagctttctcgtcccttatgggatgagagggctttttttattttctgaaaaatgttgtggaggaatgaaaatggattacaaagatacgctgttaatgccgaaaacagattttccgatgcgcggaaatctgccgaatcgtgagccggacatgcaaaaagactgggaggagcaggacatttaccgtcttgttcaagaacggacgaaagaccgcccgaaattcgtgctgcatgacggacctccttatgcaaacggagacatccacatgggccatgccctgaacaaaatcctgaaagacttcatcgtccgctataaatcaatgagcggctacaacgcaccgtacgtgccgggctgggatacgcacggactgccgattgaaacggcgctgacgaaaaacaaaaaagtaaaccggaaagaaatgtcagtagcagaattccgcaaactatgtgaagagtacgcttggaagcaaatcgagggacagcgtgagcaattcaaacgtcttggtgtccgcggtgactgggaaaacccatacgtgacattaaaaccggaatacgaagcgcagcaaatccgcgtatttggtgaaatggcaaaacgaggctacatttacaaaggccttaaaccggttaactggtcaccttcaagtgagtctgctctggctgaagccgagatcgaatatcaagacaaacgttcagcatctatttacgtcgcttttggtgtaaaagacggaaaaggcgttcttgaaaacggcgagcgcatcatcatttggacaacaacgccttggacaattccggcgaacctcggaatctcagtgcaccctgatcttgagtacagcgtgattgcagtaggtgaagaccgctttgtcgtagcaagtgccttagtcgaaagtgttgcatcagcatgcggatttgatcagtatgaagtgacaagaacggtcaaaggaaaagaccttgagaacattatcgctgaacacccgctatatggcagagactctctcgttatgcttggtgaacacgtaacaactgatgccggaacaggctgtgttcatacagcgccaggacatggggaagatgactttatcattggccaaaaatacggtttagatgtgctttgcccggtcgatgaaaaaggtgtaatgacaagcgaagctcctgggtttgaaggcatgttctatgatgatgcaaacaaagcgatcacacagcagctcgatgaaaaaggcgcacttgtgaagcttgaattcattactcactcttatccgcatgattggagaacaaaaaaaccaaccattttcagagcgacagcgcaatggtttgcgtctattaaagatttcagatcagacctgctggatgccattaaagaaaccaaatgggttcctgaatggggtgagcagcgtttgcacaacatggttcgggaccgcggagactggtgtatttccagacagcgtgcgtggggtgtgccgattccggtattttacgctgaaaacggagaaccgattattacagatgaaaccattgaacatgtttctgaattgttcagacagcacggatcaaacatttggtttgaaaaagaagcaaaggatcttcttccggaaggctttacgcatcctggcagcccgaacggcacatttacaaaagaacaggatatcatggatgtttggtttgattcaggctcttcacatcaagcagtgcttgaagaacgtgatgacctcgttcgcccggctgatttatacctagagggatctgaccaatatcgcggctggtttaactcttctctttctacagcagtagccgtaacaggaaaagcgccgtataaaggtgtgctcagccatgggttcgcactggatggagaaggacgcaagatgagtaaatcaatcggtaacgttgttgttccggctaaagtcatgaaacagcttggtgccgacatcttaagattatgggtatcgtcagtggattatcaggcggacgttcgcgtgtctgacgccattctgaagcaggtcgcggaagtataccggaaagtccgcaacacgttccgcttccttcacggcaacctgttcgatttcaatccaagcgtcaatgccgtggatgtaaaagatctccgcgaagtggatcaatatatgctgatcaagctgaataagctgatcgataaggtgaaaaaagcgtacgatgaatatgaatttgcggttgtttatcacagcattcacaatttctgtacgatcgagctcagctccttctatcttgattttgcaaaagatgttgtgtacatcgagcatgcggatcatccggaccgccgcagcatgcagacggtcttctatgaaacgctgctggcgttagtgaagctgacggcgccgattctcccgcacacggcggatgaaatgtggtctcacttatcatttgttgaagaagcgagcgtgcagctgacagatatgccggaaaccattgctgttccggacagtcaagcgacagaagaaaagttcgaccgcttcatggagcttcgaaacgacgtgctgaaagctttggaaacagcccgtaacgaaaaaattatcggaagatcattggaagcgagcctgactttgtatccgaacaaagaaaaccgcgacctcttgtcatccattaaagaaaacatcgcgcagctgtttatcgtctcagaactgacagtaaaagacgaaagtgaagcgccggaaaacgcgcaaagcttcacaacaggaaaaatgaccgtagaaaaagcggaaggccagatgtgtgaacgttcccgcgtaatttctaaagatgtcggagccaatccgaaatatccgacgttatcactgcgcaatgcggaaatcgttgaaaaatattatcaaaaataataaatgagaaagcgcccggtgacagccgggcgctttttttacatgccactaatgtcatcgattagaacgacaggaaaaatcttatgggcttcaaatggcgctctgggggcaacaataaagctataacatcaagagcaggagttgtgatgaatgaatgatcaactgaccgcaatccacacggagcttctcatgatgaaagaagaacttcaatcaagattattcgaatattcttgctttcaaatgtcagcatctgttgaaccttcaatgaacgaccaagaagcaactctgatctatcatataaaagaagaacttcaggacgttcttcttgccctgtctaagtttgaaaacaatacgtacggttattgtgaaaaaacaggcgaccccattccgattgaaaaacttgcggtgctgccgacggccagaaccgctgatgatttttattatcccgctcaatttgaaaagaaaacccttccatattgggaacccggagattatgcatatgatcaggcgctgtatgagtgacagcgtctgtttgcatgcgcttatgatctgcctttactctggcatcttttactgataaaattcataaaggataaaagtaactgtatactggaggaacgtgtgtgctttattatctaatcgctctttttattattattgccgaccaattgaccaaatggcttgtcgtcagccatatggaattgggacaaagcatacctgtcatcgatcaggtgctttatatcacatctcatcgcaacacgggagcggcgtgggggattttagccggccaaatgtggtttttctacgtcattaccatcgccgtgattatcggaatcgtttattacatacagcgttatgcaaaagggcagatgttactcggaatttctctcggcttaatgctgggcggtgcggccggaaactttattgaccgggcggcgcgccaggaagtggtggattttattcatgtcatcatcgtggattatcactatccgatttttaatatcgcggactcctcactgtgcgtcggtgtaatacttttatttattcatatgctgtttgacagcgggaaaaagaaggagcaataacatgaatcaatttgagataaccgttcagcctgaacaaaagagcgaacggattgataaatttttggcttcaacgggagaaaactggtcacgcactcaagtgcagcaatgggtaaaagagggattggtatccgttaacggcaaatccgtaaaagcgaattataaaatgcagcccggcgatcaggtaaacgtcaccattcctgaaccggaagaattggacgtgcttgcagagccgatggatttggacatttactatgaggatcaggacgtcttggttgtgaacaaaccgcggggcatggttgtacacccggcgcccggccatgtgactgggacgcttgtaaacggactgatggctcactgcaacgacctttccggcattaacggcgtcatgcgcccgggaatcgtccaccggattgataaagatacttccggtctgttaatggtcgctaaaaacgatatggcgcatgaatcactcgttaatcagctcgtcaataaaaccgtgaccagaaagtacacagcggttgtccacggggtgatttcacatgatgacggaacgattgacgctccgatcgggagagataaaaaagaccgtcaaagcatgaccgtaacaagagaaagcagcaaaaacgccgtcacgcatttccacgtgcttgagcgttttcaagatttcacgctcgtagagtgccgtcttgagaccggaagaacgcatcagatccgtgttcatatgaaatatatcgggtttcctttggcaggcgacccgaagtacggaccgagaaaaaccattgatttcaatggtcaggcgcttcatgccggaatattaggttttgatcatccgcggacgggcgaatacatggagtttgaagcgccccttcctgaagatatgaaaaaactcattgaagatttaagaaatagccattgacagcgactttcttttctgaaataataaaaacaagctgaatagattctttaacacagtccagagaggctgagaaggataacggataggacagaagagatacacgtgtgtcttcgtcctggaaaggaacccctctatgctctggcaggaggggttttttcttcttatatacgaatggagaggtgtcacgagtgaatcaaaaagctgttattctcgacgaacaggcgatcaggcgggcgctgacaaggatagcccatgaaatgatcgaacggaataaaggaatgaatgactgcattcttgtagggattaaaacaagaggcatttatttagcgaagcggctggccgagcggatcgaacagattgaagggaatccggtcaccgtcggggaaatcgatatcaccctttaccgtgacgacctgacgaaaaaaacgagcaatgaagagccgcttgtaaaaggcgcggacattccggccgatattacagaccaaaaggtcattgtggttgatgatgtgctttataccggccggacggtgagagctgcgatggatgccctcgttgatgtcggacggccgtcatcgatacagcttgccgtgcttgtcgacagagggcaccgggagctgccgatcagagcggactatatcggaaaaaacattccgacctcaaaagctgaaaaagtgatggttcagctgagcgaagttgatcagactgatatggtcgccatttacgaaaatgaataatcacctttttaaatgcattccagagagtttgcaaagaggattttaaaacacaaagccgggcggatcgacgcggccgggttttgtatgcctctttgcgcaaaaagcaaagaggtttttttataccatttgaaagtcaaccgggaggaaaacgccatgagtaagaaaaaagtaaacctgggagtcagggacgtccccaatccattgtcctggctgtcattcagcctgcagcatttattcgccatgttcggttcaaccatactcgtgccgaaactggtcggaatgagcccggcagtggcgcttgtcacgagcggaatcgggacactcgcctatctcttggtgacaaaaggccagattcccgcttatctcggctcatcattcgcctttatatcaccgattatcttggtgaaggcgacgggagggccgggggctgccatggtcggcgctttcctggcgggaattgtgtacggcctgatcgcgctgctcatcaggcagcttggaacggggtggctgatgaagctgctgcccccggtggtcgtcgggccggtcatcatcgtcatcggcctcggactggcaagcacagccgtcaatatggcaatgtatgctgatccgaatgcgaaggaactcgtctacagcttgaaacatttcagtgtagccggcgtcactttggccatcaccattatctgcgccatctttttacggggatttttaagcctgattccggtattgatcggcattataggcggatatctgtttgcgctgacacagggcatcgtcaattttcagccggtcattgatgcaaagtggttcgccgttcctgaatttatcatccctttcaaagactatacgccgtcagtgacattgggcattgcggctgcgatggtgccggtcgctttcgtgacgatgtcagaacatatcggccaccaaatggtgctgagtaaagtcgtcggacaggatttcattaaaaagccgggactgcaccgctccataatgggggacagtgttgcgacgatcatcgcttcgttaatcggcggcccgccgacgacgacatacggcgagaacatcggagtactggcaattacgagagttttcagcgtctttgtcatcggcggcgcgggtgtgattgcgctgtgcttcggatttatcggaaaagtatcagcgctgatcagctctgttccgtccgcggttatgggcggcgtttccttcctgctcttcggaattatcgcctccagcggcttaagaatgctgattgacaacaacattgattatgagaacaagagaaatttgattatcacatccgtcatcctcgtgatcggcgtcggcggtgcgttcattcaagtatcaaaaggcgggttccaaatatccggcatggcgcttgcggcaatcgtcggagtcatcctgaaccttatcctgccgcatgcaaatgaagaagacgcgatggcatcagaaaaacaaaatcatatgtaaaaccttttaaagaaagtccagagaggcttggaagggttataacgggaagaagctgtacgctgcttctctctttaaccgcaccccgagtctatagaccggggtgtttttttacggccttcaagcggaaacggaggagaaaaacatgaatcatttaacggcgatgtctgaactgagcgcagctgaaattacagaactgctgcgtgaggcaaaagcgataaaagagggaacagtccgccccgatctcgcgggaaaatttgttgcgaatctgttttttgaaccgagcacgagaacgcggttcagctttgaagtggcggaaaagaaactcgggatgaacgtgctcagcttagacgatacgagcacaagcgttcaaaaaggcgagtccttatacgacacggtcaaaactctggaatcaatcggagcggacgcctgcgtcatcaggcacagcacggatgaatattacaaagatctgaccggcagagtcaatattccgatcttaaacgccggcgacggctgcggccagcacccgactcagtcattactcgatttaatgacgattcaagaggaatttgagacctttcagggcctgacggtttccattcatggcgatatcaaacacagcagggtggcaaggtcaaatgccgaggtgctgacaaggctcggcgcacgcgtgctgttttcagggccgccgcaatggcaggatgagaaaaacgccttcggcacctgtgtacagacggatgaagccatacaagcttcagatgtcgtcatgctgctccgcatccaaaatgaaaggcatcagacagaagccgaccaaaaaggctacctggaagcatacgggctgaccgcaaagcgggcggagagcatgaagcggcatgccatcatcatgcatcccgcaccggtgaacagaggagtcgaaattgacacaacattagtggaatgcggaaaatcaagaatctttaaacaaatggaaaatggtgtgtatatcagaatggcagtcttaaaaagagcactgcaaaccaatgtgaaaaggggagaagcggcttatgtcttatctcattaaaaacggctggatgttaaatgaacagggagaaaaagtggcacaggatatccgggtaacgggtgaattcatttcggaaaccgggcttctgacagcgaaagacggagaaacggtgatcgacgctgacggactgttcgtttcaccgggactcgtagaccttcatgttcacttcagagaaccgggcggcgagaaaaaagaaaccattgagacgggctctaaagccgcggcgcggggcggctttaccacagtcgcagccatgccgaatacaagaccggtgccggatacgaaagagcagatggaatggctgcaaaaccggatcaaagaaacctcatctgtcagggttcttccttacgcatccattacgatcagacaaaccggcgaagaaatgacagattttgaggcgcttcatgaagccggcgcattcgccttcaccgatgacggcgtcggcgttcagacggccggaatgatgtatgaagccatgaaacgggcggcttcaatgaataaagcgattgtcgctcattgtgaggataactcgcttatttacggagggagcgtgcatgaaggttctttttcaaaagcgaacggcctgaacggcataccttccatttgtgaagcggtacatatcgcccgtgacgtgctgctggcggaagcggcgggctgccattaccacgtgtgtcatatcagcacgaaagagtccgtcagagccgtaagagacgcaaaaaaagcgggaatccgcgtgacggcggaagtatcgccgcaccacctgctgctttgtgacgaagatatcccgggacttgataccaattttaagatgaatccgccgcttcgcagcaaagaggacagagaggcgctgattgaagggcttttagacggtacgattgatttcatcgccactgaccatgcgccgcatacagaagaagagaaaaacacggatatgaagcttgcgcctttcggtatcgtcggtttagaaacagcctttccgcttctgtacacacattttgtgaaaaacggggcgtggacgctgaagcagctggttgatttcatgacgtcaaaaccttgcgaggcatttgatcttccgtacggaacgcttgcaccgggggcgccggctgacatcaccctgattgatctggaaaaagaagcagccattgacaaagatacatttttatctaaaggaaaaaatacgccattcaacaagatgaagtgcttcggctggcctgttgcaacgatggctgccggtaagcttgcatacgaagaagggagactcgtcaaatgaaaagaagactagtgctggaaaatggagcggtatttgagggtgaagcattcgggagcctggagcataccgcgggtgaagtcgtattcaacacgggaatgaccggttatcaggaaattttatcagacccttcttactgcgggcagatcgtgacgctgacgtatcctctgatcggcaactacggaattaacagagatgactttgaatccatcactccttttgtaaaagggctgatcgtaaaagaactgtgcgagctgccttccaactggcgttcggcttacacgcttgacgagtatttgaaaatgaaaaatattcccggcttacaagggattgacacgagaaagctcacaagaatgatccgcacggccggcgcattaaaaggaacgtttgcttcaagtgaggagaatgtcggagaggttctggcaaggctgaaagaaacggaactgccgagaaatcaagtcgctcaagtatctgcgaaaacggcttatccgagtccgggccgcggcaaacgcatcgtactcgtcgatttcggtatgaagcacggcattttaagagagttaaacaaaagaaaatgcgatgtcatcgttgtgccgtacaatgtaacggcggaagaagtgcttcagctcaagccggacggcatcatgctttctaacggacccggagatccgaaagatgtgccggaagccattgaaatgataaaaggcatactcgggaaggtgccgttattcggaatctgcctcggccaccaattatttgcgctggcatccggagcggaaacggaaaaaatgaaattcggacacaggggttccaatcatccggttaaagagcttgcgacagggaaagtcgctttaaccgcccaaaaccacggatatacagtttcttcaatagatgagacagagcttgaagtgacgcacattgcgatcaatgatcaaacgatcgaaggactcaagcataaaacattgccggcatttacggttcagtaccaccctgaagcttcaccggggccggaagacgccaatcatttatttgacagattcattgacttgatcgaaacaactgagaaagaaggggaagcggtatgccaaaacgcgtagatattaaaaagattttagtgatcggatcaggcccgattattatcggacaggcggcggaatttgattatgcgggcacacaggcgtgtctcgctttaaaggaagaaggctatgaagttattctcgtcaactcgaatccggcaacgattatgacggatacggaaatggctgatcgggtatacatagaaccgctgacgccggagtttctcacgcgtattatcagaaaagaacggccggacgccatcctgccgactctgggaggacagaccggactgaatcttgccgtcgagctgtctgaactcggggttcttgaggaatgcggagtggaagtgctcggcacaaagctgtccgccatccagcaggcggaagaccgcgacttattccgtacgctgatgaatgagctgaatgaaccggtgccggaaagtgagatcatccgcactttacaggaagccgaggaatttgtcggccggatcgggtttccggttatcgtgcgccccgcttacacattaggcggaacgggcggcggcatctgctcgaatgaagcagaactgaaagagatcgtcgaaaacggattaaaactcagccccgtccatcagtgccttcttgaaaaaagcattgccggttacaaagagatcgaatatgaagtcatgagagacagcagagatcacgcgatcgtcgtctgcaacatggaaaatatcgatccggtcggcatccatacgggcgacagcatcgtcgttgccccgagccagactttgagcgaccgggaatatcagcttttgcgcaatgtttcattaaagctgatccgcgcgctcggcattgaaggcggctgtaatgttcagctcgcgctcgatcccgacagcttccaatattacattatcgaagtgaatccgcgggtgagccgctcatctgccctcgcctcaaaagcgacgggttacccgatcgcaaagcttgcggcgaaaatcgcagtcgggctttctcttgatgaaatgatgaatcccgtaacgggaaaaacatatgcggcttttgagcccgcgcttgactatgtcgtttctaaaatcccgcgctggccgttcgacaaatttgagtcggcaaaccgcaggctcgggacgcaaatgaaagccaccggagaggtcatggctatcggacgcacccttgaagaatcgctgttaaaggcggtccgctcactggaagccgatgtctatcacctggaactgaaggatgcggaagagatttctgacgggcttttggaaaaacggatcagaaaggccggagatgaacggctgttttatcttgctgaagcgttcagaagaggctatacagtcgagcagcttcatgagttttctgcaattgacgtattctttttgcacaagctctgtaagctggtcgcttttgaaacagagctgaaagcggaaaaaggcagccttaccgttctgcagacagcgaaggaattcggtttctccgacaaatatatcagccgggaatggaatatgccggaacaagagctgtatcaaatgcgaaaagaagcagacatcaagcctgtatataaaatggtggatacatgcgcggcggaattcgaatcagaaaccccgtacttctacagcacatatgaggaagaaaatgagtctgaggttacatcaagaaaaagcgtcgtcgtcctcggttccgggccgatccgtatcggacagggcgtcgaatttgactatgcgaccgttcattctgtctgggcgatcaagcaggcaggctatgaagcgattattatcaacaacaatcctgagacggtgtccactgatttcagcatttcagacaaactgtattttgaaccgctgacggtagaagatgtcatgcacatcatcgatttggaacagccggaaggcgttgtcgtccaattcggcggccagacggcgatcaatcttgcggaagaattgagcgcccgcggcgtcaaaatcctcggcacatcacttgaagatttagaccgtgcggaagaccgggataagttcgagcaggcgcttgaggcgctgaatgtgccgcagccgctcggaaaaaccgccgtatcggtgaacgaagcggtcaaaattgccgcatccatcggctatccggtacttgtccgcccttcgtatgtgctcggcggccgggcgatggaaatcgtctatcacgaagaagagctgcttcactatatgaaaaacgcggtcaaaatcaacccgcagcatccggtgttaatcgaccgttatctgacagggaaagaaatcgaagtcgatgccgtatctgacggcgaaacagtcgttattccgggaattatggagcatatcgagcgggccggcgtccattcaggggattcaatcgccgtctatccgtctcagtctttaagcgaagacattaagaaaaaaatcgaacaatacactgtagccttggcaaaaggccttaacattatcgggttgctgaacatccagttcgtactgtcgcaaggtgaagtgtatgtgcttgaggtaaatccgcggtcaagcagaaccgtgccgttcttaagcaaaatcacaaaaatcccaatggcgaacctggcgacaaaggtcattctcggccaaaagcttgctgatttcggctatcaagaggggctgcagcctgaacagcagggggtattcgtgaaagcgcctgtcttctcattcgcgaagctgagaagagtagatattacgttaggccctgaaatgaagtcgacgggagaggtcatgggcaaagattcaaccctggaaaaagcgctctataaagcgctgattgcttctggcattcaaatcccgaactacggctcagtgctgttgactgttgccgataaagataaagaagaaggactgctgatcgcgaagcggttccacgccatcggctataaaatcttggcgacggaaggaacggcggcttatttgaaagacgctcagattccggctcaggtcgtcggaaaaatcggcgaagaagggaaaaatctgctcgatgtcatcagaaacggcgaagcgcaatttgtcatcaatacgctgacaaaaggcaaacagccggccagagacggcttcagaatccgccgcgaatccgttgagaacggagtcgcctgcctgacatctttagatacggccgaagccattttgcgggtattggaaagcatgacattccgggcggatcatatgcctgcatccgaaaccaatcaaaaggcggcagccacgatatgaagaaagcgcatttgactgttcaatccaacttagaaattgccgaccggatttataagatggtgctgaaaggagagcttgtccggcaccttaccgagccgggtcaatttctacatctgaaggtgagtgacgcggtcacgccgctattaagaagaccgctcagcattgcggacgtcaatttcgccgcggatgaagtatccgttatctacagagctgacggtgagggaacgcgtcttttgtccgagaaaaaagagggcggcaggatagacgttctcggccctctcggcaacggattccccgtccggcggattgaacccggcaaaaccgcgctgttagtcggaggcggagtcggggttccgcctttgcaggaactgtcaaagcgcctgacggaaaaaggcgtaaacgtcattcatgtgcttggatttcaatcagcaaaggatgttttttacgaacaggaatgtcgtgcgtacggagacacctatgtggcgacggctgacggaacatatggagagaaagggtttgtcaccgatgtcatccgtgaaaagcagctcgaattcgatgtcctgctaagctgcggaccgacaccgatgctgaaagctctgaagcagcagtacggccataaagaggtttatctttcgatggaagagcgtatgggctgcggcatcggggcctgcttcgcctgcgtgtgccgcacgggtgaaagcgatacatcctatgtaaaggtctgccttgacgggccggtatttaaagctgaggaggtggcgctgtaatgttagaggtgaatctgccgggtctccaattgaaaaacccgatcatccccgcttccggatgtttcggtttcgggaaagaatatgccggattttacgatttatcatgcctcggaggcattatgattaaagccacgacgaacgaagcccgcttcggaaatccgacgccgagagtggcggagacaagcgcgggaatgctgaatgccatcggactgcaaaatcccggccttgagcatgtgctcaatcatgagctgccttggctcgaacaatttgacacgccgattatcgcaaatgtcgccggttctcaggtggacgactataaagaagtggccgagcacatcagccaagcgccgaatgtgcatgcgcttgagcttaacatttcatgtccgaatgtcaaaacgggggggattgcttttggtactgatcccgtcatggcggccgaactgacaaaagcggtgaaagaagtttccgcagtgcctgtgtatgtgaagctttcgcctaatgtcgcaaacataaccgaaattgccaaagcgattgaagcggccggtgctgacggtctgacgatgattaatacactcatcgggatgaggctcgatctcaagacgggacggccgatcttagcaaataaaacgggcggactgtcaggcccggcgatcaaaccggtcgccatccggatggtatacgaagtcagccaggccgttcaaatcccgattatcgggatgggcggcgttcagaccgcagaggatgcattagaatttcttcttgcgggagcgagtgcggttgccgtcggcacggcaaacttcgtcaatccgttcgtctgcccggaaatcatagaacagctcccccgtgtactgagccaacacggctttcaatctgtaagtgaatgcatcggaaggagctggaaacatgaaaaacaacctgcccatcatcgcgcttgattttgcatcaggggaagagactttaacgtttttagacttgtttgaaaaggaaaggctttttgtcaaaacggggatggaacttttttatcaggaaggccccgccatcattcaccaattaaaagaacggaactgtgatatatttttagatttaaagcttcatgatatcccgactacggtcaataaagcgatgaagcggctggccggcctcggcgttgatctcgtcaatgtgcatgcggcagggggcgcacgcatgatgcgtgcggcccttgaggggcttgaagaaggcacgccggcaggcagaaaacgcccgtctttaatcgcggtgactcagctgaccagcacttcagagcaggtggcgaaggaagagcttctgctgcataagccgctgttagaaacggtcgtgcattacggcaaaatggcggaagagtgcgggctggacggagtggtatgttcggtacatgaaacaaaagccatttatgaagcggtccggccttcatttctgacagtcacaccgggcatccgcacggccagtgacgcagctgacgatcaagtccggacggcgactccgtcatttgcgaaagaaaacggttcgtcagccatcgttgtgggccgctcaattacaaaagcggaaaaccccgttaaagcatatgaagcaattaaactggaatgggagggcgttcgccgatgaaacaggctatcgcaaaacatctattacacattgaagctgtctttttacgcccgaatgagccgtttacgtgggcgagcggtattttatcaccgatctattgtgacaaccgtctgacattgtcgtatccaaaagtgagaaatgatgtggcggacgggctcggcaaactgctgaaagagcattttcccgaggcggagatgatctcgggcactgcaacggcgggcattccgcatgctgcgcttctcgcagaccgtgcaggcgcaccgatgtgctacgtcagaagcaaaccgaaagcgcacggcaaaggaaatcaaatagaaggcgccattaagaaaggacaaaaaacagtcgtgattgaagacttgatttctaccgggggcagcgtgcttgaagctgcggcggcccttcaaagagagggcgcggaagtcctcggcgtcatttccatttttacatacggactgccgaaagcaaaagaagcctttaaaaaagcgggtcttccttattactcgttaacggattatgacacgctgattgaagtcgcgcttgaaaacggtacgattcattcagatgacattgagaaactgaaatcatggaaacagaatcccgagtcaaaagattggtttaaaaaataatgacaataaaaacaggcctcagggcctgttttattattcctatcaaaaaactcgggttgacttctgttagaattgtgctaaaatttagtacaaatctaaaaagcttatcaagagcggctgagggactggaccgatgacgcccggcaacctgcgtgtcatgcaaggtgccgcatccagaaaaatgcacagcattttgaagataagggctataccgggtcactgtctttcattccgctggattgaaagttttttatatgaaaaaaaagattgagggataagacaaccggcagaaaacaacagctgtttgattgtctccgggaggaggaaaggaaaaatgctaacgtatgacacatgggaagagccggcgattacatttccggaagacgattcctataaaggcgcgctgtccgttttaaaatgggcatacggccactacggagaccagcttgtttacgcgtgcagcttcgggattgaagggatcgtcctgatcgatttaatttctaaagtaaagaaagacgcggaaatcgtgtttcttgatacgggtcttcactttaaagaaacatatgaaacgatcgaaaaagtgaaagagcgttacccgggactgaacattatcctgaaaaagccaagccttactcttgaagaacaggccgaggctcacggagataaactgtgggaaagagaaccgaaccagtgctgctacatcagaaaaattctgccgttaagagaagcgctcgcgggacatccggcatggctgtccggtcttcgccgggatcaagggccgagccgggcgaatacgaatttcctgaataaagacgacaagtttcaatcgattaaagtatgcccgctgatccattggacatggaaagacatctggagatatacttccaagcatgagctggattacaatatcctccatgatcaggggtatccgagcatcggctgtgaaccgtgcacttcacctgcgtttaccgcggaagatttgcggagcggcagatggaacggcatggcgaaaacagaatgcggactgcatgaataaaggagctgcacgatggaattagccgctattttattctgcctgttttttgccatgaatatcggagccagcggagccgcggcttcaatgggagtcgcttacgggtccggcgccgttaaaaagaaaacgtatgcgctgatcatctgcgcggccggagtcctgtcaggggcggttatcggcggcggtgaagtcgttaagacgatcagcggcggaattattcccgaacaaaccattacgctcaccattgtctgcattattatcggatcggcggcgctatcgttattcacggcgaatgtgctcggcattccgctgtcgacgagtgaggtcactgtcggggcgattgtcggtgtcggcgtcgcgtacaaagtattgtttttacagcatcttttagtcatcgtgagtttttgggtgcttgtaccgttcgtcgcgttctgtttcacgtttctcgtctcaaaggtattcagttctctgaatattcgagtcatttcgaatcggaaacagaagattttagggattgtgctgctgattgcggggttttgggaagctttttcagccggaatgaacaatgtcgcaaatgcggtgggccctttggttgctgcgggcgtgctcagcgtgtccaaaggaacgctgtacggaggcatctttgtcgctctcggcgctctgcttttaggacgcaaagtgcttgaaaccaacgggaaaaagattacgagattttcagccggagaaggcatactgctttcaggaaccggcgcggggcttgtcattatcagttcagtcttcggtctgccggtcccattggcgcaagtcacatcatcatcaattatcggtatcggaatggccaaaaacgggccgaacgtttttcataaagaagtcgtgaaaacgatgctcaaagtatgggtcgtttcgccgtttttgtcactgtcgatttcgtatttgcttgtctccctgctgttaaaaggagattactattccatctttatgatggccagcgtgcttttggcagctggcggagccgccagtctgatgaaagccatccgaaaagagaaacgctctgtccatgaacaaggcggaggcatttaactattaatctgagtttatttatctgttaactgggaggaatcatgtattatgagtttagcaccgcacggaggaacattaattaatcgggtaaatgagcagtatgatcttacatccgtccaaaaagaaattgagcttgatttgatttcgttcgctgatttagagctgatcgggatcggggggtacagcccgattgaaggatttttcacagaaaaagattacgtgtcagtcgttgaaaatatgcgtctggcatccggggttgtctggtccctgccgatcacgcttccggtcgattcagaaaaagcggctgagcttgccgtcggcgacacggtgaaactgacttacggcggagaaacatacggcgtagtcgacatcgaagatatttatacgccggataaacaaaaagaagccgttcacgtatataaaaccgatgatgccgcgcatccgggcgtgaaaaaattattttcacgcggcgatacgtatgtcggcgggccgatcacattagttaaaaaagcgtcaaagcagtttcccgagtttacatttgaacctgccgatacaagacgaagcttcgaagaaaagggctggaaaaccattgtcggtttccaaacgagaaatccggtccaccgcgcccacgaatatatccaaaaaaccgcgcttgagacggttgacggcctgtttttgaacccgctcgtcggtgaaacaaaatcagatgacattccggcggatgtcagaatggaaagctaccaggtgctgctcgatcattattatccgaaagaccgcgtgttcctcggcgtatttttggcggctatgcggtatgcggggccgagagaagccattttccacgcgcttgtccgcaaaaactacggctgcacgcattttatcgtcggccgcgatcatgccggcgtcggtgattactacggcacatatgaagcgcaagagctttttgatcaatttacagcggatgaactcgggattacaccgatgaaattcgagcacagcttcttctgccagaaatgcggcaacatgggaacggccaaaacatgcccgcatgacagagaagaccacgtcattctgtcaggaacaaaggtcagagaaatgctgcgaagcggcgtcatgccgccggcggaattcagccgtcctgaagttgtcgaggtgttgattaaagggctgaaaacgaaagaagaagcaggcgtttcttaaggaggaaaatagagtgacaaatcgtgatatcgtgtggcatgaagcctcaataacgaaagaagaataccagcagaaaaacaagcataaaagctctatcctctggctgacgggcttaagcggttcaggaaaatccacgattgcaaacgccgcagcgcgcgagctgtttgaacaaggctatcaagtcatcgtgcttgatggtgataacatccgccacggcttaaacaaggacttaggtttttccgatgatgaccgcaaggaaaatatacgccgcatcggggaagtggcgaagcttttcgttcagcagggaaccatcgtcatcacggcttttatttctccgttccgtgaggacagagatcaggtgagagagcttgtggcggagggcgaatttaatgaaatctatgtgaaatgcgacctcgatatatgtgaaaagcgcgatccgaaaggtttatataaaaaagcaagaaatggtgaaattccgttctttacggggatcgactcaccgtatgaagagccgaaagcgcctgagctcgtacttgattcaggcaaatgtgaacgcgaagaatgcaccggaagactggttgactttgtgaaaaacagcttagcataataggtccaaaaaggccgcgcaatcagccggatatcccccgcaatggcgggatatggtaaaatagctgaagtgcggcctcgcggctgttctgggaagatttcaaaacggatcggggagacatgctatggggaaagtatttatcgttggagccggtccgggagatccggacttattaacggtgaaggcaatgaaagccatacagaaagcggacgttatattatatgacagattggtaagcaaagagattttacagtatgccggagaagaagcggatctgatttactgcggcaagctcccggattttcacattatgaaacaggatacgatcaaccgtttccttgtgaagtatgcgaaaaaggggaaaaccgttgtaaggctcaaggggggcgacccgtttgttttcggccgcggaggcgaagaagcggaggctctcgcacaaaacgccattccgtttgagatcgttcccggcattacatcaggaatcgcggctgctgcttatgccggcattcccgtgacgcacagagaggcgagctccaatgtcgcattcgttacgggacattataaacaagaagacgactttgaagaaaaatggaaagcgctggcgacgggcattgatacgctggtgatttatatgggaattaaaaatatccggcagattgaaagaatgctgctggaaaacggcagagacgccggcaccccggcagcctttattcattggggaacgacggacaggcaaaaaacagtcgtctgcaccgtcggcacgctttcagacacagtgataaaagaagaaatcaaaaacccgagcttaattgttatcggcgatgtcgtcaattatcactgcaaactggactggtatgcatctgaacagaaaaatctggatttgagcgaggcgttgtaaatgaagcaggcgattttatacatcgggcacggaagcaggctgaaaaaagcgcagacagagtcggcggcgtttttaaaagggtgcatgccgcacgctgacgctcccattcaggaaatttgttttttagaactgcaggaaccgtctattgaagcgggatttgaagcatgtgtcagacaaggcgccactcatattgcggccgtgcctttgctgctgttgaccgctgcccacgcaaaacatgacattccggctgaaatcgcccgtgcggcggccctgcatcccgatataaaagtgacatatggtgttccgatcggagtggacgatgaagtcgtaaaagcggtgcatcatcgcattgaagataccggagtgcccattgagcaggcgaaagtggtgctgatcggaagaggaagcacagatccggcagttaagaacgcagtcagtgagattgccggaaaacttgaggcgattacacctgttaaagaagtcatcccttgttttttaacagcatgtgatccgcactataaagaagtgtttgccggctttgaagaggatgacggagcacccgtttttatcgttccatatcttctgtttaccgggcttttaatgactgagattgaacgggaagttcaaaagcttcaaacggtcaatcaaaatgttcatctcgcttcatacttaggttttcacccgcatattaagcaggcgtttttgaaccgtgtgtcagaagctgttcgaaaccccggcggtcagtttgattttaaggggggacagtatgctgcctctgcacattaatttaagcggaaaaagaattatcatcgcgggcggaggcaatgttgccttaagaaggctcaaaacggtgcttccggaaggcgcggatattactgtaatcagtcccgatgccctgcccgaaattaaacagctggcggatgaagggcgcatccgctgggtttcccgtaaaattgaaatgaaggatctcgcgcccgcttttttcatcattgccgcgacaaatgaccgcagcgtgaatcaggagatagccgcgagcgcttctgaaacgcagctggtcaattgtgtaagcgatgctgaacagggcagcgtgtatatgccgaagatcatccgcaaagggcgcattcaagtatccgtatcaacaagcggcgcaagcccggcacatacgaaaagactggctgaggacttagagcctctcattactgctgatttggctgaagaagtggatcgattatttgagaaaagaagaagaccataaaaaacaccttgtctgtcatcaggcagggtgttttttatactgtcctcacagtccccgaatgtgaacaattcaaaacgaaagcgggcagtttgaacggtatatgccggcaagcggtcagggttgcgaagtgatgcggaatatgtatctgatcccaattccgcctggattccgcccgcatacaaaggaaaggtcagagacccgcccggatgtgctcaggtgcggcgagggaaggtgacagtatccgccgccaaatcaggtgtgaccgctttaatcagagacggcccccggcggatcaggcagacatgacgggaaactgatcagatactgtatagatggttctgacggctgggagagtgtcgtctccgtttataagtaataaaaaacacctccaagctgagtgcgggtttcagcttggaggtgcgtttattttttcagccgtatgacaaggtcggcatcaggtgtgacaaatacggtatgctggctgtcataggtgacaaatccgggctttgcgccgtttggctttttcacgtgtctgatttttgtataatcaacgggaacggagccggaatctttcgccttggaaaaataagcggcgatcgcagccgcctccagtatggattgttcatccggatcgctgcttttaatcacaacgtgggaaccgggaatgtctttcgtgtggaaccataaatcatcccttgcggcagcttttgtcgttaagtattcattttgtttattgtttttgccgacaagaatcgtcaatccccgtgaagattcatattgctccaaaacaggaacgtgctgcttctgttttttctgtcctcgctgctgtttcggtcgcagatatttgccttccacaagctcttcccttatttcgtgaatatcctttgtggaggcggaggagagctgctggatcagctgatcgaaataagcgatttcctcctcggccagacggatctgttcttttaccacctcgacggaattcttcgccttttgatactttgtaaaatacatctgcgcgttttctgaaggtgttttgttcggatttaaagggatggtcactgtcttactttcttcatcataataattgatgacttccgcttctttgtcaccttttttcagcatgtacaaattcgccgtcagcagttcgccgtatagctggaattccttcgcattttctgagtagtcgagcgtcttttccagcttttttatcttattggcgttctttttccgttcatttgcgacaaaccgctcgagatcctgagcctgctgtttgacgcggtcgcgttccgccttgccgaaataaaaccggtccaacagctcactcagtgagtgaaaggtgcgctcctcaccgtttacatgtgtgagagacaggagataaaagtattcctttccgccggctgtcgtaatgttcggtgtaaacctgcaatctttcacggcatggaacatttcaatcagcgtcttcggcagcgttattttgttagcgagacccgctctgtgcacggcttcttttgcaaacagcggagaaacaccggagaagtgtctgacgatctgctggtcaagccgtccttcctgaaaactgagataacgcaaaacgtcctcttcatccgcggcaagcggcgaaattttttcctgagcgggaggaagcttgtaatcatatcccggcagaacggtccggtagctgttcatcgacggagataaatgcttcagtccgtcgatgatggctccttctccgtcagtcaggataatattgctgtgccgtcccataatttcaacatacagtgttctgacggtttcgtcgccgatttcatttctgctttttatccggaatatcataatccggtctaatccggcctgttctattttctcaataaatccgccttctatatgctttctgagcagcatacaaaacatcggcggctcgctcggattttcataggcctggtttgtcatgtgcacccgtgaatagctcggatgcgccgataataataatttatggttttttccgttagcgcggatatgaaatatcacatcgtgcttaaaaggctgatggactctcgtaatccggcctccggcgatccggctgtttaattcatgtgtcattccgtatgtaaacatgccatcaaaagacatataaaacaccctttccttcttcctgcattcgataattatagcatgaaaagggacgagtcagaataagcttgtttacagagtgacatctctaaagcgaggcaggggagtggacgagaagaatgaagtttcatgaaatgggacaaaccgatttgctgaaagcaacaaatacgtccattaaacaggggttgaccgaaaaagaggtgaaaaaacgccttgaaaagcacggaccgaacgagcttcaggagggcaagaggacactggcgatcgccgtgtttttcgcccaatttaaagattttatggtgctcgtgctgctggcggcaaccttaatatccgggtttttaggcgaatatgtagatgccgtagcgattatggcgattgtatttgtcaatggggttctcggtttttttcaagagcggcgggcggaaaagtctttacatgcattaaaagagctgtcaacgccgtatgtgtcagcgttgcgggacgggagctggaagaaaattcagtccaaggagctcgttcccggcgatatcatgaaattttcaagcggcgaccggattggcgcggatgtgcggatcgttgaagcgaaaagccttgaaattgaggaatcagcgctgaccggggaatcaattccggtggttaaacaagctgataaactgagaaagccggatgtttcgttaggcgacatcagcaatatggcgtttatgggtacgatcgtaacgcgcggcagcggtgtcggcgtcgtcgtcggtacaggaatgaatacggcaatggggaaaatcgccgatatgctggaatccgccggcagcctttcgacaccgctgcagcgaagacttgaagagctcggcaaaattttaattatcgtcgcgctccttttaacggtattggtcgttgcagtcggcgtcttacagggacatgagctttacagcatgtttttggccggggtgtcattggccgtcgctgcgattccggaagggcttcccgccattgttacggtggcattatcaatcggcgtccagcgcatgatcaaacaaaaatcaattgtcagaaagctcccggcggttgaaacattgggctgcgcctctgtcatttgttctgataaaaccggcacgctgacacaaaacaaaatgaccgtcacccatatgtggtcagggggaaaaacatttaaagtgtcaggcatcggctatgagccggagggcgttttcacccgagatgagcgggaaatcaagccgaaagatgagaagattcttgaacagatgctggttttcggcgcgttgtgcaacacatccgaaatcgcactgaaagacggccattatgtactcgacggcgatccgacagaaggagcgctgctgacggctgcaagaaagggcggctattcaaacgattggctcagcgggcactaccgcgtggttgccgagtttccgtttgactccgtccgcaaaatgatgaccgtcattgtagaggatcaggaaaaaaagcagttcgtcatcactaaaggagcgcccgatgtgctgattgaccgctcgtcacatctgatgtacgacgcaagaagcgcgccattttcaggagaaaagaaagcagaaacggaagcggttctgaaagagctggcgtcgcaagctttgcgtacgatcgcgattgcttataaaccgcttaagcccggagaaaagccgacaatggagcaggcggaaaaaaatctgacgatactcggcttgtcaggcatgattgatccgccccgtccggaggtcagacaggcgattaaagaatgccgtgaagccggcattaaaacggttatgatcacaggggatcacgtcgaaacggcaaaggccattgcaaaagatttgcgtcttcttccgaaaaaggggcgtgtgatggacggcaagacgctgaatgagcttacggagaaagaacttatcgaaacggtcgatgatgtctacgtcttcgcacgcgtgtcgcctgaacataaattgaaaatcgtcaaagcgttccaggaaaacggacacgtcgtcgccatgacgggagacggggttaatgacgcgccggccataaagcaggcagatatcggcgttgccatgggcgtgacgggaacggatgtggcaaaggaagcctcttctctcattctggtagatgataactttgctacgattaaatcagccataaaagagggacggaatatctatgaaaatataagaaaattcgtccgttatttgctcgcctccaacgtcggtgaaattttagtgatgctgtttgcgatgcttctcgctctgccgctgccgctcgttccgattcagatattgtgggtgaacttagtcactgacgggctgccggcgatggccctcggtatggatcagccggaaggagacctgatgaggcggaagccgcggcatccgaaagaaggagtgtttgcgagaaaactgggctggaaagtcgtatcaagagggtttttaatcggagctgcaaccattttagcgtttatcatcgtctatcaccgcaatcctgaaaatctgccctacgcacagaccgttgcattcgcgactcttgtcctggctcagcttatacacgtgtttgactgccggagcgaaacgtctgttttctcccggaatccgtttgaaaatatctatctgctcggggccatcatttcttctatcttcctgatggtcatcgtcatctattatccgccgctgcagccgatattcaaaacagtgccgattacgccgggcgattggatgctgattatcggtatgtcgggcatacctacttttttgctggcgggttcacttttgacaagaaaaaaataattccatatgatataatcttaggggtaatagcatgtctattgcccttttattttgataacgggaaagaattgggtgtttcatatgatacggagtatgacaggcttcggcagcgcaagcagcacaaaaggcgatctctcggcaaccgttgaattgaaatccgtcaattaccggttcaaagaagtgaacgcccgcctgccacggcctttgctatatgtagaggataagctgaaacaaacgatattgcagcatatacagcgcggaagagtagagctgtttctcactgtaaacagtgacgcgctcataaaaagaagcctgaacatcgattgggagctccttgatgaatatgtgagcgccgcacgcgtcatgaaagagcgctacagcctggccgcagaacccgatgcaatggagttctttaaatttgaacatattgcgcagatacacgaagaacagatgcgtgatgacaagcttgaagaagtcatcagggaagccgctgagctggctgtaaaggaactttgtgacatgagggaaaaagaaggacggcttttggcggaagactgctttctgcacatcgagcggcttgagacgctgtccgaacaggtgaaagagcgcgcttctgccgttgttattcaataccgcgagcgtctttacgcccgaatgaaggaatggacggaggatgcgctcgacgaaagcaggctgatcacggaatgcgccattttcgccgatcgttctgatataacggaagaaattaccagattgaagagccattttgttcaattccgtgatatattaaaagaaggcggggcagtcggccgcaaacttgatttccttgttcaggagcttaaccgggaagcaaacacgatcggctcaaaagccaatgatcatcaaatcacaaagcttgtcgttgaaatgaaaagttctattgaaaaattgaaggaacaagtgcaaaatatagaatagcgactgtgcgtattgtttacagacggcctcttcaggttacactagagacgtctattttacagggggaacgtagaagatgacgattaaactgattaatatcggatttggcaatatcatctccgccaatcggatgatttcgattgtcagcccggagtctgcgccaataaagcgaatgatccaggatgcaagagaccgcggaatgctaatagacgctacatacggacgaagaacccgtgcagttgtcgtcatggatagtgatcacattatcttatctgccgtccagcctgagacagttgcacacagactttctgtgaaagaagaaattatggatgaagggcaggggtaattgccgcatgaaagaaagagggttattaatcgttctctcaggtccctccggagttggaaaaggaacggttcggcaagcaatattttcacaacaggacacgaaatttgaatactcaatttcagtcacgacgagaaacccgagagagggcgaggtcgatggcgtcgattatttctttaaatctagagatgaattcgaacgcatgattgaaaacaacaaactgcttgagtgggcagaatatgtcggcaactattacggaacgcccgttgattatgtcgaacagacgcttcaagaaggaaaagacgtcttcttagagattgaagtgcagggcgcgctccaagtgcggaatgcatttccggaaggcctgtttatcttcttagcgccgccgagtctttctgagctgaaaaacagaatcgtgacaagaggaactgaaaccgacgatttaatcgaaaacagaatgaatgccgcaaaagctgaaatcgaaatgatggacgcgtatgattatgtcgttgaaaacgacgatatccaaacggcttgtgataagattaacgcaatcgttctcgccgagcacttaaaacgtgaacgcgtcgctccgagatataagaaaatgctggaggtagaataacttatgttagatccgtcaattgactctttaatgaataaattagattctaaatatacgctggtgaccgtgtctgcaagacgcgcgcgtgaaatgcagatcaaaaaagaccagcagattgaacataccatttctcacaaatatgtaggcaaagctttagaagaaattgacgcgggcctgctttcgtttgaaagagaagacagcgaataacaagcacacgtagcaacctatctctacataggttgttatttttttccgtttgggatttgtccaatgctttcataaaggggagaagacttcatgaaaaaccgaaacattttgctatgcgtaagcggaggaattgccgtttataaagcttccgcactcacgagcaagctggttcaggccggcgcaaacgtcaaagtgattatgactgagtccgcgcgtgagtttgtttctccgctgacatttcaggcgctgagccggaatgaagtatatacagatacatttaatgaacaaaatccgaaggtgatatctcatattgatgccgctgactgggcggatttaattattgtcgcgcccgctacggcaaatatcatcggaaagcttgccaacggaattgctgacgatatgctcacaacgacggtgctggcggctgaggccccggtctgggtggcgcctgcgatgaatgtccatatgtatgatcatccggcggtgaaacggaacatctctgtgctttatcaggacggggtccgctttatcgaaccgagtgaaggctatttggcatgcggatatgtcggcaaaggaaggctggaggagccggagcttattgttgagcgtgtcagagagcattttaaggagcctgaagacgatgcgccgctgaaaggaaaacatattgtcattacggccggtccgacgcgcgaagccgtggaccctgtccgcttcttcacaaataaatccaccggcaaaatgggctacgccgctgctgaagccgccgtccgtctcggggcacgggtgacgctgatttcaggcccggtgtcaatagagccgccagtcgggctgtatcagtttcttcctgtgcaatcggcagccgatatgagagaagccgtgctttctgtgtttgattcatgcgacatggtgattaagacggcggccgtggccgattttacgccggcggctgtttctgatcacaaaatgaagaagaaagacggttcgctcgtgatcgaattcaaccgtacagcagacatactgaaagaactcggcgaacggaaaacacaccagctgctggtcggttttgcggctgaaacgcaagacgtcgaacgctatgcgcgcagaaaactcgaacagaaaaaccttgatatgatcgttgcgaatgatgtgaaagcagaaggggccggatttggcacggatacgaatgtcgtcaccttctatttccgggacggaagaaaacgggagcttgcgcttatgtctaaacttgacgtttcctttgaaatgctgaaggaaatgaccgctttgaaagccgaggaccgaaaacccgtatgaatgtagcagaagtcattgtcgatgtcagctccaaaaacattgacagaccctttgattacaaaattcccgatcatttaaaagggatgatcgaagtcggcatgcgggtgattgtcccgtttggcccgcgcaagcttcaaggatttgtgaccggtttgaaagattcgtctgaattaaacggcggctcaatgaaggaagtcgagaagcttcttgatttgacgcccgttctgactgaggaactgatgcagctgtcttcatggctttctgacaaaacgctgtcgtttaaaatcacggcgcttcaggcaatgctgcccgccgcactgaaggcgaagtacgagaaagagctgaaagtcgttgacgaagaagcactgacaccggacatcaaacagcttttcaggaatcaaaaaagtcttttgtactcggatattaccgatgaaagcattctttcgtcacttcagaaattcgtgcgcaaaggaagcattgatgtcacatataaagtcgcccaaaaaacgaataaaaaaatgatccgcatgatcgaagcgggggcggacaaagaagaactcgcccggcacgcagattcattgacaaagcaggcttctaaacagctcgccgtacttacttattttatcggcgggggagcaaagatttccgcggccgagctttgcaaaaagaccgattccagttccgcgacgctgaaaacgcttcttaaaaaggggcttcttacggaaagctttgaggaggtttaccgcgatccttatcaggacagaatgttcaaaaaaacagagccgctctctcttacagaagagcagcaggccgcttttgagccgattaaacaagctgtagccgatcatgtccatcacgtctttctgcttcacggcgtcacgggaagcggcaaaacggaaatttacctgcaatccattgagaaagtgctggcaaaaggacaagaagccatcgtgctcgttccggaaatctcgttgacaccgcaaatggtcaaccgttttaaaggccgcttcggctcacaggttgcggtcatgcacagcggattatccacaggtgaaaaatacgatgaatggcggaagattcagcgcaaggaagtccggcttgtcgtcggagccagatcggccatctttgccccgtttgaaaatctcggcatgatcattattgatgaagagcacgaatcttcctataagcaggaggaaatgccgcggtatcatgcaaaggacgtagccatccgccgggccgagcatcacagctgtccggtcgtcctcgggagcgccacgccgacattggagtcatttgcgcgggcgaaaaaaggcgtttatgagctgcttccgttaaaacatcgcgtgaatcgccagctcatgcctgacgtttctctcgttgatatgagagaagaactgagaaacggcaacagatcaatgttttcaagagaactgatggaacagctggaagagaagcttgcaaaaaaagagcaggccgtcctttttctgaataaacgggggtattcctcgtttgtgatgtgccgggactgcggttatgtgccgcaatgtccgcattgcgacatttcgatgacttatcaccgctacggacaaaggctgaaatgccattactgcggccatgaggaacctgtcccgggaacatgcccggaatgcggcagcgaacatatccgctttttcggcacgggaacgcagcgtgtggaggaggagcttaccaaagtgctgcctcaggcgcgcgtgatcaggatggatgtggacaccacttcaagaaaaggcgcccatgaaaaactgttgtcagcgttcggtgaagggaaggcggatatcctgctcggtacgcaaatgatcgcaaaagggcttgattttccgaacgtgacgctcgtcggagtattaagcgcagatacgacgcttcacatccctgatttcagggccgcggagaagacattccagctgctgacgcaggtaagcggccgggccgggcggcatgaaaagccgggaacggtggtcattcaaacgtatacaccgtctcattacagcattcagctgacgaaaacgcacgactatgaaactttttttcagcaggaaatggcgcacagacgggcccagtcatacccgccttattattacgtggcgctggtgaccgtttctcatgaagaagcggcaaaagccgcggtcaccgcagaaaagattacaaactatttaagagcgggatgcgggcctgatacgaaaattctcgggccggcggcttccccgatcgccaggatcaaagatagatatcgctatcaatgcgtgataaaatacagacaggaaaacgagttgcagattcagttgaaaaagatactggagcactataaacgcgacattgcgcaaaagcatgtcatgatttcaatcgatatgaatccgtacatgctaatgtaacattagtttttggagggcaaaattttggctgtgaaaaaaatcgtcacacacccggcggaggttctggaaacacccgctgatgaagtgacagtgtttgataaaaaattaaaaaaattgcttgacgatatgtacgatacgatgctcgaaatggatggcgtcggcctcgccgcgccgcaaatcggcattttaaaaagagcggccgtcgtggacatcggtgaagaaagcggccggatcgaccttgtaaatccggttattcttgaaaagagcggtgaacagaccggagtcgagggctgcttaagctttcccggggtttacggggatgtcacccgcccggattacgtaaaggtaaaagcctatgaccgtaaaggaaaaccgtttattttagaagcggagggttttttggccagagccgttcagcatgaaatggatcatttagacggcattttattcacatcaaaaattacggcttactacactgaagaagaactggcagaaatggaaggatgattggatgacaaggatcgtttttatgggaacgcccgatttttcagttcccgtcctgcgcacgcttattgaagacgggtatgaagtggttggtgtcgttacgcagcctgaccgcccgaaaggcagaaaaaaaatcatgacgccccctcctgttaaggctgaagctgaacgtcacggcattcccgtgcttcagcccgaaaaagtaaggctcgaagaagaaatagaaaaagtgctcagcctgaagccggacctgattgttacggcggcattcggacagatcctgcccaagcagctgctggacggcccgaaatacggctgtatcaacgtacacgcgtcactattgcctgaattaagaggcggagcgccgatacattattcgattctccaaggcaagaagaaaacgggcgtgacaatcatgtatatggttgaaaagcttgatgcgggcgatatgatttcgaaaatcgaagtggaaattgatgaaacggataacgtcggcacgcttcacgacaaattaagcatagcgggggcaaagcttttgtcagagaccgtcccgaacgtcatttccggaaatattaaaccgatcaaacaggacgaatcaaaagcgacttacgcgcctaacattaagcgtgagcaggagcggattgattgggcaaagcccggagaagagatctacaaccagatcagaggtttaaacccttggcctgtcgcctatacaactttgaacggtcaaaatatgaaagtatgggcttctgaaaaagttgcggcaaaaactgaagctgcgcccggaacagtcatccgcacggagcaaaacggcattgtcgtcgcatcaggaaacagcaccgcccttttaatcacagagctgcagccggcgggaaaaaaacggatgaagggcgaagattttgtaagaggcaaaaatgtgcagcccggtgacgtgttaggagaagcaaatgaagaaaattaatgtccgggagctcgcccttgaagcgcttgagaagcttgagcaaaatcaggcatacagcaacctgcttcttacatcggttatcaaaacgaacacgctcagcgatcaggacagaggactgctgacagagcttgtctacggaacactgcaaaataaaatcgccttagactacatgctgaagccttttatccgcaagccgaataaagtgaagccatgggtgattcagctgcttcgtctgtccgcgtatcaaatggagtatttagaaaaaataccggatcgcgccgccattcatgaagcggttgagatcgccaaaaaacgcgggcataagggcattgcgtcctttgtcaacggcatcctccgctccctgcagcgtgaaggggcgccgtcattcgctgaaattgaagacccggttctccgtctttccacagagacaagccatcccgagtggctcgtaaaagagtgggtcgaggcgtacggctttgaggcagctgaaaagatctgccggattcatctcattccgccgaagcagacgctccgtgtcaatcacataaagagcgacagggaaacggtgctgaatgagatggagaatgccggtcttgaagctgaagccggagacctttcttctgatgcgattaagcttttaaaaggaagcatcgcgaacacggcatttttccaaaacggccgggtatccatacaggatgaaagctcaatgcttgtcgcgcgggcgctggacccgaagccgggcgaaaccgttttagacgcatgcgccgcaccgggcggaaagtcggctcacattgcggaactgatggagaacgaggggagcctcacatcgcttgatcttcaccgccataaagtgaagctgattaaagagggcgcagaacggctcgggcttacgatcatcgacgcacaaacgatggatgcgcgaaaagcgggagaggcctttggcgcagaacggtttgaccgtgttctcgttgatgccccttgctcaggtttcggcgtcatcagaagaaaacccgatatgaaatatacgaagacgccggaggacagcagacggctgtcagaaatccagctcggcattttaagggaaatcgccccattagtaaaaaaaggtggcacactcgtatacagtacgtgtacaatggaccggacagaaaatgaagaagttatgcatgcgtttatacaagaacaccctgagtttgaacccgatttgtctcttgaaaagcggctgcctgaaaaggcgagaccctttgttcaggatggaagccttcaaattcttccgcattatttcggaacagacggtttctttattagcagcatgagaaagaagggataaaaaatgacacaattaaaaaagacaagcgtacggaaagagctgcggactgagcagccgtccatttactcttttgaattagatgaaatcaaacaatggctgaccgagaatggcgaaaagccgttccgcgcagcacagatttttgaatggctctatgaaaagcgggtttcttcatttgatgaaatgacaaacctctcaaaaagcctgcgtgaaaaactcgagagcaattttgtgctgacaacgctgaaaacggctgtaaaacagacatctcaagacggcacgatgaaatttttatttgagcttcatgacggttatacgatcgaaacggttttaatgagacacgagtatggtaattctgtatgtgtaacgacacaggtcggctgccggatcggctgcacattttgcgcgtcaacgctcggcggactgaaacggaatcttgaagcgggagaaatcgtcgctcaagtcgtgaaagtgcaaaaggcgcttgatgaaacggatgaacgcgtcagctcagtcgtcatcatgggaatcggagagccgtttgataatttcaatgaaatgctcgctttcttaaaaatcattaaccacgataaagggctgaacatcggagcgcgtcatatcacagtttccaccagcggaatcattccgaagatttacgatttcgccgatcaaaaaatgcagatcaatttcgcgatttctctgcatgctccgaatacggaaatcagaagccgtctgatgccgattaacaaagcctataagcttcctgaccttatggaggccgtcaaatattacatcgagaaaacaggcagacggatcagctttgaatacgggctgttcggcggcgttaatgatcaggtcgaacatgcagaagagcttgcagaactgttaaaagacgtgaaatgccatgtcaatttaattccggtaaactatgtgcctgaacgggattacgtccgcacaccgagagatcagattttcgcattcgaaaaaacgttaaaatcccgcggtgtaaatgtcacgatcagaagagagcaaggccatgacattgacgcggcctgcggtcagcttcgcgcgaaggagcgtcaagacgagacgaggtgaagaggttgattacagccttgaaaacagatacaggtaaagtccgccggcataatgaagatgcggcgggcattttcacaaaagaagacgcggtgcttgcggttgtcgccgacggcatgggcggtcatcttgccggagatgtagcgagcaggatggcggttgcggcgatggaagagcagtggaaccggaccgaaacggttccatctctgccgtctgcttgcgaggattggctgaaagaccggattcatgaggcgaatgtcaaagtacatgaccacgctaaagcgaatgaagaatgccggggaatgggcaccactgttgtttgcgccttattcaccgggaagtttgtcactgtggctcatatcggtgacagccggtgctacctgcttcaagagggggaattcactcagctgactgaggaccattcgcttgtgaatgagctggtcaagacaggagaaatttcaaaagaggacgccgagcaccatccgcggaaaaatgtattgacgagagcgctggggacagatgaaaccatcagtcccgacgcccgttcttttgaactgtctgacggcgatcagctgcttttatgctctgacggactgtcaaataaaatagaagatcacgagatcaaacaaatgcttcaagccgaatctgatcctcaggaaaaagtagaccttctcatcagcaaagcgaatcaaaacggcggcgaagataacatcacggctgtgttgattgagttttccgcagatgcaaaagagggtgaagacaagtgctaaccggcaagcggatcagcgggcgttatcatatcctccggcccattggcggcggcggtatggcaaacgtttttttagctgaggacatcattctcgaacgtgaagtcgcaattaaaattctgcggtttgactttgtgaatgacattgattttatcaggcgtttcagaagagaagcacagtcggcatcaagcctcgatcatccgaatatcgtcagtatttacgatatcggggaggaaggcgatatttattacattgtcatggaatatgtggaaggcatgacattaaaggaatacataaacgcacacggaccgcttcatccgaaagaagcgctgtccgttatggagcagatcgtctcggccatcgcccatgcccatcaaaaccatatcgtgcaccgggatattaaaccgcacaatatattgatagatcatttagggcatatcaaggtgacggatttcggcatcgccacagcgcttacgtctacgacaatcacacatacgaattctgtgctgggctcggttcattatttgtctccggagcaggcgagaggcggtctggcaacgaaaaaatcagatatttacgcgctcggcatcgtgctgtttgagcttttaacaggtaaaatcccttttgacggagaatcagccgtcagtatagcgctaaagcatctgcaaacagaaacgccttccgccagaaagtggaacccttccattccgcagagcgtcgaaaacattattttaaaggcaaccgctaaagacccgtttcaccgctatgaaagcgccgaggacatggaagcggacatcagaacggcttttgacgccggcaggctgaatgaacaaaaattttccgtgccggatgatgaggaaatgacaaaagccattcccgttattactgacggcgcaaaagccgcgcctcaggcggaaacgccgggggagacggatgataaggaacagcagcccgccaaaaagaaaaaacggaaatggccgtgggttttgctggccgtctgtttcattttcattatggcggctgttcttgcggtcaccgtgtttccgtctttgtttatgcctaaagatgtaagcgtccccgacgtacggggcatgaagtacgaaaaagcggaagccctgcttgaaaagaacgggctccgggcggatcctgatataacggatattgaagatgaaaaaatagaagaggaattaatggtcaaaacggacccaaaagcggggtctaccgttaaagaaggctcttctgtaaaactgtacaaaagcatcggaaaaccgaaaacccagctgatcgacgtgaaagggcggcagatcggcgacgcaaaaaaagcgctgaaggaaaaaggcttcaaacatgtcaatgtcaaagaagagaacgatgacagcgaggccggcactgtaattgatcagaacccgtcagccggcaccgatatggtcgcaagcgacgatgaagtcaatctaacggtcagcctcggccccgcggatgttacgctgagggacttaaagacttacagcaaagaagcggcttcagggtatcttgaagataacggcctgcagcttgttgaaaaacaagcccattcagatgacgtgccggaaggacaagtcatgaagcaagagccggcagccggcactgcggttaagccgggaagtaatgttgaagtgacgttctcgctcggacctgaagaaaaaccggcgaaaacggtaaaagaaaaaatcagcattccttacgaacccgaacatgaaggggacgagcttgaagtgcaaatcgccatcgatgataaggaccacagcatctctgatacgtatgactcatttaaaataaaagagccgactgaaaaaacaatcgaactgaagattgatcagggacagaaggggtattatcaagtgatggtcgatcataaagtcgtcagctacaaaacgattgaatacccgaaagataatgactgacaaggagggaccctatgcctgagggcaaaattataaaagcgttaagcggattctattatgtcttggatgaatcacaggacaagatcattcaatgcaggggccggggcattttcagaaaaaataaaataacgcccctggtcggcgattatgccgtttatcaggctgaaaatgataaagaaggctacctgctggaaatcaaagaacgaacaaacgagctgatcaggccgccgatttcaaatgtcgatcaggccgttcttgtcttttctgccgttcagccggcgttcagcacgtctttattggaccgttttctcgtccttgtggaagccaacggcattcacccgatcatctgcataaccaaaatggacttagctgcagaaggggaatcgaaagaggcgatactttcttacgtgaaagactatcaggcgatcggttatgacgtatatgtgacgtcatcaaaagaaaacagcggcttaacaggcattgtgaaacacttcgagaacaaaacaacggtgtttgccggtcagtccggagtcggaaaatcttcgcttttaaatgcgatcagcccggagcttgagctgaaaacaaacgagatttccacgcatttgggacgcggaaaacatacgacgcgccatgtggagctcattcatacatcaggcggtctggttgcggatactccggggttcagttcgcttgaatttaccggcattgaggaagaagagctgggcagcacgttccctgagatcagagaaataagcgcctcttgcaaattcagaggctgtctgcatcttaaagagccgaaatgcgcggtaaagcaagcggtggaagaaggagagattcagccgtaccgctatgagcattacaaagaatttatgcaggaaataaaagagagaaagccgaggtattaatatgattaaggttgcgccatcaattctttccgccgattttgcttcactgggcgaggaaattaaagacgtggaaaaaggaggggcggactatatccatattgatgtcatggatggccatttcgtccctaacattacaatcgggccgcttatcgttgaagccgtccgtccggtgactgatctgccgctggatgtccatcttatgattgaaaacccggaccgctacatcccggcattcgcaaaagccggtgcggacatcctttccgttcatgctgaggcgtgtccgcatcttcaccggaccattcaattgataaaagagcagggagtaaaagcgggagttgtgctcaatccgcatacgcccgtccaaatgattgaacatgtgatcgaggagcttgaccttgtgctgttaatgacggttaaccccggttttggcggacagcgcttcattcattcggttctgccgaaaatccgtcaggtcaaacagctggctgaggagaaaggcctgtctgagcttttaatcgaagtggacggaggcgttaataaagaaacagcccctttatgcactgaagcgggcgccaatctgcttgttgccgggtctgccgtatataatcagccggatcggaaaaaagccatcgctgacatccgaaacgcgtaataaacatgctgaaaaagagcccggtgaaagccgccggctcttttcgcgtctaagagagaggaaaacatatgaagacaatcaatatcgttgcgggcggcccgcgggaacttattcccgatttatccgaatacacagacggagatacaacgtgggtcggagtcgataaagggacggttgctcttttggaagccggaatcattccgcaggaagctttcggtgattttgacagcattacggaagaggagctcatgcagattcaaaaagcggcgccggccctccatgtgtatcaggcggaaaaagattataccgatcttgaactcgcccttgactgggctttacaaaaagaaccggaaaccattcggatattcggtgtgacgggcggaagagccgatcattttttagggaacatccagctgctgtataaagccttacataagaataccgatgtcgagctgatcgaccggcagaatgacattcagatgttcgggcccggccgttatacaattgaagaaaaagcgcgcagacgctatatttctttcattccgtttacggaagcggcagacggcctgacactcgacggttttaaatatccccttgataattgtcatattcctctgggttccacactatgtattagtaacgaactcattcattcacgaggtactttttcgtttgcaaaaggcatattaataatggtaaggagcgcggattagaaaagcggcttctgccatatgcggaaaaaaccatgaatcctaaagtgatgaacgcagcggatacgggacttataggaggggacaaaatgaaattttataccattaaattgccgaagtttttaggaggaattgtccgggcgatgctgggctcatttagaaaagagtaagcccaagaagctgaaattgccctctttgaacgcataaaaaacgcctgccgcataaaagggcaggcgttcatttttgcttatacacgctcaactttaccggattttaaagcccgggcagatacatacacttttttaggtttgccgtcaacaaggatgcggaccttttgaaggttggcgccccaagtacgcttagaagcgttcattgcgtgagaacggttgtttccggcttttgtttttttacctgtaataaaacatttacgtgccatttgtttccctcctaactgcgcgaaacatcttttcaaacatagtgtctcagatgctttcgttatacaatactttaaataatttaccacagctaaaaaccgtttgcaactattgtttcccttactttcaagaaaaatcacttgacatgtaaaaccaatcacatttccgcgctgaaggccgctgtctgtatcttttcttttcataatgggatacatatagtagaataatgataactctatgcatctgaaggaggaacctgtgtgtccattgaaatgaagacaaaatacggacagattgatatatccaacgaagtcatcgcaatggttgccggaggcgctgccattgactgttacggaatagtggggatggcctcaaaaaaccagattaaagacggtttgtctgaaatcctccggagagagaacttcgcaaaaggcgtacatgtccgtcaggaagccgaacaaatacatatcgacatgtacattattgtcagctacggcactaaaatatccgaagtagcccacaatgttcagacgaaggtaaaatacacagtaaatcaaacaatcggacttgcagttgattctgtaaatatttatgtccaaggcgtacgagtaacgaacccgtagtgaggaggatgagtattgtctagacgaaacttagatgggagagcttttgcggcaatgattctggcgggggctgagacattgtctcaaaacgcgtccgcggtggatgcgctgaacgtgtttcccgtgcctgacggcgataccggaacaaatatgaatttatcgatgtcatccggtgcaagagaggtagagcacattgactcacccgacatcggcaaagtcggcatcgccttgtcaaaaggcctgcttatgggagcgagaggaaactcaggggtgatcttgtcccaattgttcagaggtttcacaaagagcattgaaaacaaaaatcaaatagacgcccaagaatttgccgcagcactccaagcgggagtggatatggcatataaggcggtcatgaaaccggttgaaggaacgattttaaccgtggccaaggatgcggctaaaaaagcggtcgcctcggccaaagaagaaaccgatattatttcggtcatggaggccgttattgaagaagcggaagcgtcgctgaaccgcacgccggatctgcttcctgttttaaaggacgtcggtgtcgttgacagcggcggaaaaggtctgctttgtgtatatgaaggctttttggctgctttaaaaggagaggccgtaccgaaaaaagcggttcttccggcactcgatgatatggtgaatgccgagcatcataaaagcgcgcagagcatgctgagtacagaagacattgaattcggattttgtacggaagtgatggtgaggctggatcaagataaacggacgttcaaggaagagacgttcagaaacgaactgagccgtttcggcgattcattgctggtcgtggctgatgatacgcttgcgaaagttcatattcatgccgaagaaccagggaacgtactcaatctcgcacagcgttacggcgatttgattaaaattaaaattgaaaacatgagggaacagcatacttcaatcatcagccaagaacatgatgaaaaaaagccggccggcgttatgaaagaagcccgcaagccttttggcatcgtgactgtggcaatgggagagggcatttctgaattgtttacgagcatcggcgcttcacacgtaatcgaaggcggccagacaatgaatccgagcacggaagatattgttgaagccgttcagtctgtcaatgcggagacggttttcattcttccgaacaattccaatattgtgatggctgccaatcaggcggcgagcgtggctgaagaaaatgtcattgtcattccggcaaaaacggtccctcaaggcatgactgccctgcttgcgtttaaccctgaccagccggctgacgtaaatgaagctaatatgcttgaggccatccggaatgtgaaaagcggacaggtgacatattcagtcagagacacccatatcgacggcaaagatattaaaaaaggtgattttatcggcattttaaacagttcaattatcggcagcgccgaagatcggataagtgcggcgaaactgctgctggatgaaatgatcggggatgaagatgaaatcgtcaccattttgtacggagaggacgcgacggaagaagaagctgagaaactcgctgagtatattgcaagcgtctgtgaagatatcgaggttgaaatccataacggcagacagcctctgtatccatatatatttgcggcagaatagaagggcttatcaggcccttctattcttatgcctttatttacctgcggcagtgcggcagtgtgcctgcttgccaattgagaaatgttcaattagtctaaagaaaagcgctgaatgaagtgatgttaaggaggagcaaaccagcatgaagtatagaagcgtttttgatattatcggcccggtaatgatcggtccgtccagttcacataccgcaggcgccgcccggatcggcagagtggccagaagcttattcaggcgggagccccgccgaatcgttgtgtctttttacggatcatttgcggagacgtataagggtcacggcactgatgtcgcgattatcggcggcctgcttgattttgatacatttgatgagcggattaaaacagcgattcaaattgcggaagagaagggcatatatgtagagttccgtacagaggatgccgtgcccgttcatccgaatacagcgcgcatcgtcatttctgatgatgagggagagcttgcccttaccggtatttccatcggcggcggaaaaatagaaatcacggagctcaacggctttgagctgcgtttgtccggaaaccatccggctattttagtcgttcacaatgataaattcggcacgattgcaggcgttgccaatgtgcttgcgaaattctccatcaatgtcggacatatggaagtggcgcgtaaggacgtcggccagcttgcgctgatgacgattgaggtcgatcagaatattgaagaagaagtgcttgacgagctttcaacacttcctaatattatacaggttactaagatagctgactaaaaagtcaggaggaaaatgacatgtttcgtaatgtaaaagaattaatagaaatcactcaagaaaaacaaattccgatttcggaagtgatgatcacccaagagatggaagtgacgcaaaaaacgcgggaagaaatctttcaaggaatggagcgcaatctctccgtcatggaagcagctgttgaaaaagggctgaagggcgtcacgagtcagaccggtttaacaggcggagatgccgtgaaacttcaggcatacatccaatctggaagaagcctgtcgggcaatctgattttagacgccgtttctaaagctgtggcgacaaatgaagtcaatgcggcgatgggaacgatctgcgctacaccgactgccggctctgccggggtcgtgccgggaacgttattcgccgtaaagcataagctgcaccctacgacagaacaaatgatccgttttctgtttacagccggcgcgttcggttttgtcgtagcaaataatgcgagtatttcaggagcggcaggaggctgtcaggcggaagtcgggtcagcatcaggcatggcagcggctgcgattgtggaaatggcgggcggaacgcctcagcaatcagcggaagcaatggcgattacactgaaaaatatgctcggtctcgtatgtgacccggtcgccggattggtagaagtgccgtgtgtcaaacgaaacgcaatgggagcatccaacgcaatgatcgcggcggatatggcgctggccgggattacaagccgcattccttgcgatgaggtgattgacgcgatgtacaaaatcggccagacaatgccgacagcactgcgtgaaacgggacaaggcggtttagccgcgacaccgacgggaagagaattagagaaaaaaattttcggaggagcgctgaaatcaagtgacacaccatcagcaaactagtatagcggaaattaagggcattgggccggaaacagaaaaaacattgcacgaacttggtatctatgacatttctgatcttctgaattatttcccttaccgttatgatgactatgagctgagggatttagaagaagtaaaacatgaagaaagagtgacggtagaagggaaggttcattcagaaccttctcttacctattacggcaaaaaacgaaacaggctgacattcagagtgcttgtcggcaattatttaattaccgcggtctgctttaaccgtccctacttaaaaaagaaactgacgttaggttctgtcgtcacgatatcagggaaatgggataaacacagacagaccgtttccgtgcaggaattaaaaaacggtcctcatcaagaagataaaagcattgagcctgtttattccgttaaagaaaacgtcaccgtaaaaatgatgagacggtttattaaggaagcgctgcagcatcatttggacagtgcggccgatccgcttcctgaaaaattgagaatccgctacaagctgcctgattacaaacatgccctgcagacgatgcatcagcctgaaacgagggaatcgttacagcaggcaagacgccggtttgtttacgaggaattcttattatttcagctgaaaatgcaggcgttccgtaaagcggaaagggaacagtcaaaaggcatcagccatgtgtttcctgctgaaaaactcgccgctttcacaaacagcctgccgttttcgctcacgaccgcacagacgcgcgtgcttcgggaaattaccgctgatatgacatccccttaccgaatgaaccgtctgctgcaaggtgatgtcggttcagggaaaacggccgtcgccgccatcgctttgtatgctgcgattttgtcggggtatcagggggcattaatggtgccgactgaaattttggccgaacagcatgcagattctctcgtatcgttgtttgcaaatgaagatgtaaatatcgcgcttttgacgagttctgtcaaaggaaagcggcgcagggagcttttggagcggcttgctctcggagagattgatattttagtagggacccatgctttaatccaggatgaagtggagttcaaagcgctgagccttgttattacggacgagcagcaccggttcggggtcgaacagcgcaaaaaactcaagaataaaggtcaggatccggatgtgctgtttatgacagctactccgattccgagaacgctggccattaccgtcttcggagaaatggatgtttccgtgatagatgaaatgcccgcggggcgaaaacaaatcgaaacgtattgggtgaaacacgacatgctggagcggattttggcttttatagaaaaagagctgaagcagggaaggcaagcctatgttatctgcccgctcattgaagagtcggataaactggatgtacagaatgcgattgacgtatataacatgctgtctgacgtttaccgcggtaaatggaatgtcggcctgatgcacgggaagctccattctgatgaaaaagatcaggtgatgagagaattcagcgccaatcaatgtcaggtacttgtgtcaacaaccgtcgtagaagtcggcgtgaacgtgccgaatgcgacgattatggtcatctatgacgccgaccgtttcgggttatctcagctccatcagctccgcggccgggtcgggcggggagaccaccaatctttctgcatcttgatggcagatccgaaatccgaaaccgggaaggaacggatgagaatcatgtcggagacaaacgacggcttcgaactgtctgaaaaggaccttgaactgcgcggccccggtgatttcttcggaaaaaaacagagcggtatgcccgagttcaaggtggcggatatggttcatgactacagagctttggaaacggcccgccaggatgcggccaatctggtgtcttcagaggcgttttggaaagatgacgaataccgcatgctgcgcggtcaattactttcaagcggcgtcctggaaggggagaaattaagctgattctgcaaaattcggcggctttcaaaaaacaatcattgcattccaatctatgagattatatactactattagtacctagtcttaattgtccggatggtgtttacagatgagaagaagcaagaaagaacgccaaaaattattgcagcagacgatcaaatcgacacccttcatcacagatgaagaattagcggggaaattcggcgtcagcattcagacgatccgtttagaccgcttagagctctcaataccggagctgagggaaagaattaaaaacgtggcagaacaaacgcttgatgatgaagtgaaatcactgtctttagacgaagtgatcggtgaaattattgatctggagcttgacggccaggccatttccatattagaagtaagacgcgagcatgtcttcagccgcaatcaaattgcgcgggggcatcatttgtttgcgcaggcgaactcactcgccgtagccgtcattgatgatgagctggcgctgaccgcaagcgcaaatatccgctttacaagacaggtgaaagaaggcgagcgcgtcgttgcgaaagccaaagtgacggcagtcgaaaaagaaaaaggcagaacggtagttgaagtcaacagctatgtgggagaagaagtcgtgttctccggcagctttgacatgtaccgttcaaaacaatcataaaggtggagcatgcatgagaatagctgtagatgcaatgggaggcgacaacgcacccaaagctgttattgacggagtaatgaagagtattgaggcatttgacgatcttcatattacgctggtcggtgacaagacaacgatagaatcacacttgccaacaacatcagaccgcatcactgtgttgcacgccgatgaagtgattgaaccgacggatgaaccggtccgcgccgtacgcagaaagaaaaactcttctatggtgctgatggcgcaggaagtggctgaaaacagagcggacgcctgcatctcagcggggaatacgggtgcactcatgacagcgggactgtttatcgtcggcagaattaaaggaatcgaccggcctgcgcttgcgccgacgcttccgaccgtttcaggcgacggtttccttcttttggacgtgggagccaatgtcgatgccaaaccggagcatctcgtccagtacggaattatgggatctgtatatgcccggcaggttctcggaatcagctcgccccgcgtcggattgttaaatgtcggcacggaagaaaagaaaggaaacgacctgacaaaaaagacgtttgaactattaaaagaaacaaacgtgaattttgtcggaaacgttgaggcgagagacttgctcgaaggcgctgctgacgtcatcgtcacagacggctttacgggcaacgtcacgttgaaaacattggaaggttcagcgttatcgattttcaaaatgctgaaagatacactgacttcaagttttgtttctaagctcgcagctggagtgctgaagccgaagctgatggaaatgaaactgaaaatggactattctgagtacggcggggcgagtcttttcggtttgaaagcgcccgtcgttaaagcgcacggctcttctgacgcacgcgctgtttaccatgcgctgcgccaggcgagagaaatggtcagccaaaacgtggccgcatttatagaagaagaagtaaaagaagaaaaaacagatgagtagtctggaggttaccgcatcatgagtaagattgcatttttatttcccggacagggatcacaatatatcggtatgggaaaagacctgtacgaacgcgaagaagcgtcaaaacgtatttttgatgaagcggatgaaacgcttgaaacaaagctgagctcgctcatttttgaaggtgacgccgaagaattaacccttacatacaatgcgcagcctgcactgttgacaacgagcatcgccgtattggaaaagtttaaagaatccggtatcacccctgatttcaccgccggccacagcctcggagaatattcggcgcttgttgcggcgggagcgatgacatttaaagatgccgtttacacggtaagaaaacggggagaattcatgaatgaagccgtgccggccggagaaggcgccatggccgctattctcggcatggatgcggagtcattgaaaaaggtgacggatcaagtgacggaaaacggtcatctcgtacagcttgcaaacttgaactgccccggccagatcgtaatttccggaacggcaaaaggtgtggagctggcttcagaggaagcgaaaaacaacggagcaaaacgggcaatcccattagaagtaagcggaccgttccattctgaattaatgaagccggcagcgcaaaaactcgaggaggtgctcagcgcctgtgagttaaaaaatgcggctgttcccgtgatttcaaacgtttcggctgacgttatgacagaaaaagacgatatcaagaaaaaactgatcgaacagctgtactcacctgttcgctttgaagaaaccattaacaaactgattgacgaaggcgtcacgacgtttgttgaaatcgggccgggaaaagtgctttcaggccttgtgaaaaaagtgaaccgccgccttaaaacaatcgcggtttctgaccatgaaaccatcgaactggcgattcaaacgctgaaggaggagaatcaggatgcttaatgaaaaaacagcagtggtaacgggagcgtctcgcggaatcgggcgggcgatcgcgcttgatcttgcgaaaaacggctgtaacgtagtagtcaactactccgggaatgaagcgaaagcgaacgaagtcgtagatgaaatcaaatctttgggccgaaacgcgatcgcggtaaaagccgatgtatcaaattccgaagaagtacaaaacatgatgaaagaggctgtcgctgcattttcttcaatcgacattctcgtgaacaatgcggggatcacaaaagacaatcttctgatgagaatgaaagaaaatgaatgggatgatgtcattaacattaacctaaaaggtgtattcaactgcacgaaagccgtgacaagacagatgatgaaacagcggtccggccggattatcaacgtatcatcaatcgtcggcgtcagcggaaaccccggccaggcaaactacgtggcggcaaaagccggtgtaatcggcttaacgaagtcatcagccaaagagcttgcgagccgaaatattacggtcaatgccattgctccgggctttatttccacggatatgacggacaagctttctaaagaagtccaagatgaaatgctgaagcagattccgctcgcgcgtttcggtgatccttccgatatcagcagcgttgttacgttccttgcttctgaaggatcgcgttatatgacgggccaaacccttcatattgacggcggaatggtgatgtaaagatttgtttttaaaatttcatcctagtttctctagttttttaaaaacgaatcctctataatacttgaggggaggtgaattgctatggcagatacattagagcgtgtaacgaaaatcatcgtagaccgccttggcgttgatgaagctgacgtcaaacttgaagcttctttcaaggaagacttaggtgctgattccctagatgtagttgagcttgttatggaacttgaagacgagtttgatatggagatttctgacgaagatgctgaaaagattgcaacagtcggcgacgctgtgaactacatacaaaaccagcaataagctgatgctaaaagtcccgcctgacagcggggctttagccctttaatcgttcggttaccggcgtctgacgctgtacgcgctgccgatcccgtttacggcggggagcgcggtgaacctgatgtgcctatggaggttactatgtcaaaacactcacattttaaagataaaaaaaagttctataaaaaaatagagcaatttaaagagttccaagaacggatttcggttcattttcaaaacgagaaacttttgtatcaagcatttacacattcatcttatgtgaatgagcatcggaaaaagccgtatgaagacaatgaaaggcttgaatttttaggtgacgctgttttggaactgacgatctcccaattcttatttgccaaatatccggccatgagtgaaggagatttgacgaagctgagagccgctatcgtatgcgagccgtcactcgtctcacttgcccatgaattgtcattcggcgatcttgttctcttgggaaaaggagaagaaatgacgggcggcagaaagcgtcctgcgcttttagcggatgtgtttgaagcgtttatcggcgcactgtatctggatcagggccttgacccggttcagcaattcctgaaagtgtacgtgttccctaaaataaacgatggtgctttttctcatgtgatggatttcaaaagccagcttcaagaatttgtacagcgggacggaaaaggatcgcttgagtacaaaattctcaatgaaaaagggcctgcccacaaccgggaattcgaggcgcttgtctctcttaaaggtgaggcgctcggtatcgggaacggacgttccaaaaaagaagccgagcagcatgcggcacaggaagctcttgcgaaaatgcaaaaacatcatacgaaacaataaaatccccctgtttccctagggggatttcagtatgtctgcgcctgatataagcgggtgattatgataatattgagatacttatacgataaggaggatctgggatgttcctcaaacgtttagacgttataggatttaaatcatttgcagaacggatatccgttgactttgtaaaaggcgtcacggccgttgtcggtccgaacggcagcggaaagagcaacattaccgaagccatccgctgggtgctcggcgaacaatcagcccgctcgcttcggggcggaaaaatggaagatatcatttttgcgggaagtgattcgcgcaagcggctgaaccttgccgaagtcacgttaacgcttgataatgaagatcattttctcccgatcgattaccacgaagtcagcgtgacgagacgggtgtaccgttccggagagagtgaatttctcatcaacaatcagcagtgccgtttgaaagacatcattgacttatttatggactccgggctcggaaaagaagcattctctattatcagccaggggaaagtcgaagagattctcagcagcaaagcggaagaccgccgcagtatttttgaagaagcggccggcgtgctgaaatataaaacaagaaagaaaaaagcggaaaacaagctgtttgagacgcaggataacttaaacagggtggaagatattctccatgagcttgaagatcaggtcgaaccgctgaaaatccaggcatcaatcgccaaagactacttagaaaaaaagaaagagcttgagcatgtcgaaattgcccttaccgcctttgacatcgaacaactgcatggcagatggtcgggtttaaaagacaaggtgcaggctgctaaagaagaagaattggcggaatcatcggctctatccgcaaaagaagcgatgatagaagagacgagagataaaatccacgcgcttgatgaatccgtcaacgaactgcagcaggttctgctcgtgacaagtgaagagctggaaaagctggaaggccggaaagaagtgctgaaagagcgcaaaaaaaatgccgcgcaaaaccgggaacagcttgaggaatccgttacacattacacgaacaaagaagccgaactgaaagccgacattgaaaaacagtctgccgtctatgataagctgcgtgcggaagtgaagcggttaaacgcccaagtgaaagaaaagcagcaggctctcagtctgcataatgaaaatgtagaagagaaaattgaacaattaaaaagcgattactttgaattgttaaacagccaggcgtcgattcgcaacgagctgcagcttttagatgaccagatgtcccaatctgcggtccagcaggcgagactgaccgcaaacaatgaaaaatatcttgaagaacgtaacgatattgcagtccgcaaagcgacgtgcgaagaagaattggctgccgttgaagaggatattcacaatcaggtcgtccgctttcgcgaagtccagacagcatatgaacagaaaaaacgccaatatgaaaagaaagaatctgcgctgtatcaggcatatcaattcgtccagcaggccagatccaaaaaagatatgcttgaaacgatgcaaggcgatttttcaggattttaccaaggcgtaaaagaagtgctgaagcagaaagagaagctcggcggcatccgcggcgccgttctcgaactgattgccaccgaacaaaagtatgaaacggcgatcgagattgcactcggcgcagcggcgcagcacgttgtcacagacgacgagcaggcggcgcggaaagcgattcaatatttaaaacagaattccttcggccgcgcgacgttcctgccgcttacggttatgaaaccgcgccagctccaaacccgtgatgaacagacggctcagaagcatccgtctttcctcggcacagcgagcgggcttgtcacatatgatgccgcgtatcggaatgtcattcaaaaccttctcggcaccgtgctgatcactgaagatttaaaaggtgcgaatgaactggccaagcttctcgggcaccgctaccgcatcgtgacgcttgagggcgatgtcgtcaatccaggcggatcaatgacaggcggcgcggtcaaaaagaaaaacaattctctgctcggcagaagccgtgagcttgagacggtgactgcgcggcttgccgaaatggaagaaaaaacagctttgctcgaaaaagaggtcaaaacgctgaagcaggccattcaagagcttgaacatacgctgagcggtctccgtgaagacggtgaagctttcagaacaaagcagcaggatgtaaaaggcaggctgtatgaactcgaagtcgctgaaaagaacatcaatacccatctggagctttacgatcaggagaaagcatcactgaccgaaagcagccgggaaaaagagacgcgcaaatcagctctggaagaacagctgagtgaggcatccggccagctgaaagagcttgaggaagagatggaaaggctgacaaaacaaaagcagaccctatcctcaacaaaagaaacgctctctcatgaactgacggaatgtaaagtggctgctgcgaaaaaagaacaggcgtgttcgagtgaagaagacaacctcaaacggctgaaaaaagagcttgaagaaacgcagctcgctctgaaagaaacacgggaagatttaagcctcctgacctcagagatgacgtccagcacaagcggtgaggagcagcttgaaaaagcagcccatcacaagcttcacgataaaacgagaacgatcgaattgatcgccagccggcgcgaccagcgggtgaagctccagcgggctcttgatacgaacgagcttgaactgaaagagatgaagcgtctgtataagcaaaaaacagacattctgaaagatgaagaggtaaaactcggccggatggaagttgagcttgataatctcttgcagtatttacgcgaggaatacagcttatcctttgaaggggcaaaagaacaatatcagctcgaactcgagcctgaagaggcgagaaaacgggtcaaactgatcaagctttcaattgaagagctcggaacggtcaatctcggcagcatcgatgaatttgaaagagtaaacgaacggtatcagtttttaacagagcagaaaaatgacctgacggaagcgaaaaacacactgtttcaagtcattgaagaaatggattctgaaatgacgaagcgattccatgaaacgtttatccagatccgttctcaattcaacgacgtgttccgttctttattcggaggaggacgggctgaactgaagctgactgatccgaatgatcttcttaactccggggtggacattatcgcgcagcctccgggcaaaaaactgcaaaacttaaatcttttgtcagggggagaacgggcgctgactgccattgcccttttattctccattctgaaagtaaggcccgtgccgttctgcgtccttgatgaagtggaagctgcgcttgatgaagccaatgtattcaggtttgcgcaatatttaaaaaaatacagcggcgacagccagtttatcgtcatcacccacagaaaaggcaccatggaagaagcggatgtcctctacggtgttacgatgcaggaatccggcgtttcccgaatggtttcggtcaaactggaagaaacaaaagaattcgttcagtaacgaggaaagaggttgaaagatgagcttttttaaaaaattaaaagagaaaatcacgaaacagacagactccgtctctgaaaaatttaaagatggtcttgaaaaaacaagaaattccttctcaaataaagtgaacgaactcgtctcccgctaccgaaaagtcgacgaggatttcttcgaggagcttgaggaagtgctgattggcgctgacgtaggttttacaaccgttatggagctgattgatgagctcaaaaaagaagtgaagctgaaaaacatccaggatcctcaggaagtgcagtccgtcatttctgaaaagcttgtcgacatttataacagcggcgacgaacagatttctgaattaaatattcaggaggggcgcctgaacgttattctgcttgtcggggtaaacggcgtcggaaaaacgacaacgatcggaaaacttgcccataagctgaagaatgaaggcaaatccgttgtgctcgctgccggagacaccttcagagccggggcgattgaacagcttgaagtgtggggggagcgtacaggcgtgcctgtcattaaacaggctgccggaagcgaccctgctgcggttatttatgatgccgtacacgcggctaaagcaagaggagcggatgtgctgatttgtgatacggccggccgccttcagaataaagtaaacttaatgaaagagcttgaaaaagtcaaacgcgtcatcgaacgcgaagtgcctgaggctccgcatgaggttctccttgcgctggacgcgacgacaggccaaaatgcgatggcgcaggcgaaagaattctccaaagcgacgaatgtgacgggtatcgcgttaacgaagcttgacggcaccgcaaaaggcggtatcgtcctggcgatccgcaatgagcttcacatccccgtgaaactggtcggcctcggagaaaaggttgacgatctccagcggtttgatgcagaatcttacgtatacggtctcttttctgatttagttgaaaaagccgaggattaatgaataaaaaacgagtataaaatggacggttttatactcgtttttttatacgcattgatagatcggaatggagggggcaattgttggacaaatggctgaaagctgaattggaaagtaaggtcggagcgataaaccatatgtcgctgctggatgaacagggaggcacttcaaccgttcgaaaaatagtggccggccaagacgcatttctgctgaaaagttcttttcaacagaagtatcgggaatggttaatgagagaagccttcgttttacaaaaactgacggaaactcgtcgtctgcctgttcctatttattatgggatgatacaggaacagcatgccagccatatcatcatgtcatttgaggatggaatcaccctgacttcggctttaagaaaagcaaaaggggatactgaaaagaaaaagctgatcaaaagtttcggccagtttctgcaacgtctgcatgaaaccgaaatggtccctggtttacagccggaatcagactggctcgatctgcaaatcaaacgagccggggaatatgtcaaaaaaggacaggctgaaggaagtgcagagcttttgaaggaattggacaggtacaggcctgttcctgttcagcagacaatgatacacggtgactgcacgactgataatgtgctggtgaaagacggagaggtctatctgtttatcgatgctgcgggaatatcggcgggagatccgcgatatgatgaatcattagcgatcagtcattttgtcacaaatgaagcatgcctcaatgctttttacgaaggctattgccgctatcgtgtatcaaaacaagaattcgagtattttaacgacggtctatatgaatttttttgaaaaaacttattatgtaaaaagagcatcatgctttgacaagataaaaacttgacacacgctctgaaaccatgtaaactaagtttttgtaaagggatttgacttaacaaaggggagagctcaaatgtcgctcgaaaaaacgacgagaatgaactatttatttgacttctatcagtcgttgctgacgtcaaaacaaaagagctatatgtcgctttattatctggacgatttctcccttggtgaaatagccgaagagtatgacgtttcaaggcaagccgtttacgataacatcaaacggactgaagcgatgcttgaacaatatgaagaaaaactgctcctttttaaaaagtttcaggagcgtaaagaaatgtttacaaagctgaaagagcttgcttccgggttgcaggaagaggaaaaaatgacggctctgattgaagcgcttgagaaattagattaggaggcggcaaacaatggcatttgaaggattagccgaccgactgcaaaagacgatttcaaaaatccgcggaaaaggaaaagtcagcgaacaagacgtaaaagagatgatgcgtgaagttcgtcttgcgcttcttgaggctgacgttaactttaaagtcgtaaaggattttgtgaaaaaagtaagtgaacgggctgtcggacaggacgttatgcagagtctgacacccggtcagcaggttattaaagtcgtaaaagaagagcttaccgagctgatgggcggcgaagaaagcaaaattgccgtcgccaaacgcccgccgaccgttattatgatggtcgggctccaaggtgccggtaaaacgacaaccacggggaagcttgccaacctgctgcgcaaaaaacataaccgcaaaccgctgctcgtggctgcggatatttaccgccccgccgcgattaaacagctggaaaccctggggaaacagcttgatatgccggtcttttcgcttggcgatcaggtcagcccagtggaaattgccagacaggcgattgaaaaagcgaaggaagagcatcatgattatgtgattttagacaccgccggacggctgcacatcgatcatgaactgatggatgagctctccggcgtaaaggaagtcgcaaatcctgaggaaattttccttgtcgtcgactcaatgaccggtcaggatgcggtaaacgtcgccaaaagctttaatgaccagctcggtttaacgggtgtcattttaacaaagcttgacggggatacccgcggaggtgcggcgctttctatccgcgcggtcaccgaaacgccgattaaattcgccggaatgggagaaaagctcgatgctcttgaagcgttccatcctgaacggatggcatcccggattctcggaatgggtgacgtgctgaccttgattgaaaaagctcaggcgactgttgatgaagacaaagccaaagagcttgagcagaaaatgagaacgatgagcttcacattggatgattttctggagcagctcggccaggtccgaaacatggggcctcttgacgaactgctgcaaatgatgcccggcgcaggcaaaatgaaaggcttaaaaaacatccaagtcgatgaaaaacagctgaatcatgtggaagcgatcattaaatcaatgactgttcttgaaaaagaacagccggatgtcattaacgccagccggcggaagcggattgccaaaggaagcggaacatccgttcaggaagtcaaccgtcttttaaagcagtttgaggaaatgaaaaaaatgatgaagcagatgaccaacatgacaaaagggaagaaaaaaggctttaaattaccttttatgtaatcggttatacatgataaaaccgttgttaagaaaaaacactttacaaacacttttatcattgttaatatactatcttgttgaaatattttcggaggtgctagtaaaatggcagtaaaaattcgtttaaaacgtatgggagcaaaaaaatctcctttctatcgtattgttgtagcagattctcgttcaccgcgtgacggccgtttcatcgaaacagtcggcacatacaacccggttgcaaagccggctgaagtgaaaatcaacgaagagcttgctcttaaatggcttcaaacaggagctaaaccttctgatacagtccgcaacttgttctcaagccaaggaattatggaaaaattccacaacgctaaacaaggcaagtaatgactgatcagaacttggaagatttgattgtcagcattgtggctccgcttgtcgaccatccggaagacataacggtcacaaaggaagagactgatcaaaagattgcgctgcgcttatctgtcaataagtcagataccggtaagattatcggaaagcaaggccggactgcaagagcgattcgaaccgtcgtttttgcagctggcgcacagtcttctaagaaagttcaatttgaaatatttgactgaaaaagggagagggccggcacctcccctttttttacacgtaaaaaaggcaaatgaacagaaatatgttggaagagtggggagtctggtcctatgcagattattcacagggtaaccgttatgcaggttctgaccgagcaaagcaaggaaaagcttttggcctcttttgcagaaaaaaagcaaacgcttgaacgagaatgcagccagctctattttcagcttagaaaacatgaaaaagatcagcagaatcccgatgtagcggaatcttttaaaaaagccattgagaaaagacaagacaaaatcaaaatgatcgatttccaaataagccagacagagtcgctcccgcttggaagcgaagtgaaggaaaaggagatcgatgcgctgctttcaatcaatgtcggtgataactggcatgaaaaaacagcggcaaataccatcgtcataaaagacggggtagtaattgaaatccgcccgaggtgataatatgacaaacagatggtttaatgtaggcaaaattgtaaatacccacggcattaaaggcgaagtgcgggtcatttctaaaacggactttgccgaagaacggtacaagcccggcaatacgctctatttgtttgcggaaggggctgcggagccaatcaaagtaacggtaagcgcccacaggcttcacaagcagtttcacctgctgcaattcaaagaaatgccgagtctcaatgaagtcgaacacctaagaaacatggtgatcaaagtccctgaagaagacttgggagagcttgaagaagatgaattttattttcatgagatcatcggctgcgaggttgtgtcagaagacggggaactgatcggcacagtgaaggaaatcttgacgccaggggctaatgacgtatgggtggttgcaagaaaaggcaaaaaagatgcgctcattccgtatattgcttctgtggtaaaggatattaatataaatgagaagaaaattaagattcatgtaatggaagggttaatagacgaatgaaaatcgactttttaacactgtttcccgaaatgtttcaaggggtgctcggctcctccattctgcaaaaagcacaggaaaaagaggctgtccgttttgacgtcatcaatttccgggctttttcggataataaacaccaaacggttgatgattacccgtacggcgggggagccgggatggtgttaaagccgcagcctgtatttgatgcggttgaaaagctgacagccggtacggacgccaagccgcgcattattctcgtctgcccgcaaggtgagcgttatacgcagaagaaagccgaggagctggcacaagaggaacatctcatgtttatttgcggacattatgaagggtatgatgaacggatccgggaacatcttgtcactgatgaaatctccatcggggattttgtgctgaccgggggagagctccctgccatgatgattgccgacagcgttgtcaggcttttgccgggcgtcctcggaaaagaagcatcccacgtggaggattccttcagcacggggcttttagagcatccgcactatacgaggcctgcagattatagaggcttaaaagtgcctgagacccttttgtcgggcaaccatgccaaaatacaagaatggcgcaataaagaatcaatcagaagaacctttttaagacgtcccgatcttcttgaaaactatcctctcactgatgagcaaagaaaatggatttccgagtgggaaaacgaatagattctattgcgcaggcgatgaagatatgataagatactacttgtggcttaaggaggcttatccttcagaagcttgaaaacgatgttccgctgtgccttgcagttgtggccaagagcatctgttggaaggagttgaaaacgatgcaaaaactaattcaagatatcacaaaagaacagcttcgcactgatcttcctgcgttccgtcctggtgacactttacgtgtacacgtaaaagttgttgagggtaaccgtgagcgtatccagatcttcgaaggtgttgtgatcaagcgtcgtggtggtggaatcagcgaaacgttcacagttcgtaagatttcttacggtgttggcgttgaacgtacattccctgtacacacaccaaaaatcgcgaaaatcgaagttgtacgttacggtaaagtacgtcgcgctaagctttactacctgcgtgaacttcgcggaaaagcggctcgtattaaagaaatcagacgataatgataacgaacgaaaagagcttgttacccgtaacaggctctttttttatatgaaatttgtaaaagcagaacaagcaacgtaaaatacataagagatcatcggaacatccggttccggtaaataaggcaggtgtcgaagtcacatgaccattcaatggttcccaggccatatggctaaagcgagacgggaagtaacagaaaaactgaaattaattgatatcgtatacgaattggtggatgcgagaatcccgatgtcatcgagaaatccgatgattgaggagattttaaaaaataagccgcgcattatgcttttaaataaagccgataaggcggatgcggctgtgactgcccagtggaaggaccactttcaggaacagggcattccctctctttcaataaactccgttaacgggcagggactgcatcaaatcgtgccgtcctcaaaagagctgctgaaagataagttcgataaaatgaaagcaaaaggtgttaggccaagagcaatccgcgcattaatcatcggcattccgaatgtcggcaagtctacgctcattaaccggctggccaaaaaaaacattgccaagacgggagacaggcccggcattaccacttcacagcagtgggtaaaggtaggcaaggaattagagctgctcgatacaccgggaattttatggcctaaatttgaagatgagcttgtcggcttgcgtctggcgatcaccggggcgattaaagatacgattatcaacctgcaggatgtggccgtcttcgggctgcgctttctggaagagcattatcccgaccgcttgaaggagcgctacggacttcaggaaatccctgaggatatcgccgctcttttcgacgcgatcggtgaaaaacgcggctgtttgatgggcggcggaatggttgactatgataaaacaacggaagtcatcattcgggacatccggacggaaaaattcggcaggctttcatttgaaacaccatcagaataaagacgcgcagcgatgcgggtctttattttttccgcagaataccgatatacataatgtaagggagaagagaacgtgaatacattaaccgtaaaaagcgtaaaagaacgcctgcaagaggtcagggacgaaagcgaccccttccttgcccaatgtgagaaagacccgagaaaaagcgtacagacgcttttagagcaatggctgaaaaagcacgcgaaggaaaaagctcttaaagagcaatggctgaacatgacggcatacgaaagactgtcatccaaaaagggcttccgcctgattgcgggtgttgacgaagccggaagagggccgcttgccggaccggttgtcgccggcgccgtcattttgccggcagaatgcgagattctcggtctcacggactcgaagaaattgtctgaaaagaagctcgaggagtattacagccggatcacggaagaagcggcggctgtaggagtcggcattgtccatgcggacgtcattgaccggatcaacatttatgaggccgcgagactggcgatggtaaaagccgtcaatgctttaacggaaacacctgattatctgcttgttgatgccatgacccttccgcttgacattccgcagtcatcagttataaaaggggatgccaaaagcgtgtcaattgccgccggagcctgcatcgcaaaagtaacgcgggaccgtctcatggctgagtacgccaaaacctaccccctgtacggctttgaaaaaaataaaggctacggaacgaaagaacatcttgaagctcttcaggcatacggaccgacaactattcaccgaaaaacgttcgctcccgttcaatcttattgttagaaaagaggcttaagacatgaacataagcggcgaaatccaagcggctttcagacagctgacggcggaaatccctccggaccggcaagacggcggtaaagacagcggcgctcaaaggctgctgttagggaaggttctccgtttgctggacgatcaaagcgctcttatccaaatcggcggccggacgatgcagggaaaacttgaaaccccccttcgtccgcaggcgtattactggttttcttatgacaaacagccggcggaaaaaacgggccggcttcatgtaattgaccaattcgaaggaagcccgaaaaccgttcaggaagcggcgggaagactgttaaacgctctttctgtcaaaccaggccctgtgtctctgcagattgccgaaacgtttatgcagcagaagctgccgatgacggaaaacagcctcaaagcttgcatccgctgggctgaatcgtttccggccgccgaattgaaaaaagcggcggaaacaatcgtatttgcgctgaaacgggaactgcccgcacatccggaagtcttgtcagccattcatgctgttaaatatccggttccgacccggcgtctcctctcaggactgcttcaggcaatcaatcaggctccgcaatcggcaaaagagctgtctgtgctcaaagaggcggtttctgacgtgttaaacgcggaaacggatcttcatgcagaacgtctcctgaagaagcttgccgaggctgcacgcatgccgctctcagaaaccgggctgatggatgaaggagaacggacggaatcaaaacaatcaccatttgtccgagagactcgtgaaaacggaaaggcagtctcaagccagccttctcctccgagtgcacgcacacatccggaactgcctgaaaaaacggcaaaacagattatagagaaattaatgacatcggcagaaaaaactgaaaaccgtcccgtaaaagtaacggcggagatcattaaggctttcatttctcaagaaaaaacatttaaaacagcacctgttcttcaaaacgcacatctgacagaacaggaggcggctgtttttgaaaaagccgctcagctcaccgaattgaaatatgcagaaaaacatgatgtattaagccttttgcagaaaatcaaaaaaggactgggcacgcgtgatgaattatcattcattacagcgcttgaaaaaggcgtatctccgcagccggagaaacaagcgctgaaaacagccctccaagccgtccggacgcttcaagaggcgccccaatccgttaaacaagaggcggaaccgcttattcataaattaaacggccagctgtttattgagcagcataatccttcttttacgcagatggtgttgtcatttccgctgggagcgtccgcgtatgagaatgacatcacagttctctttaaaggacggaagaagccggacggaaaactcgacccgtcacattgcaggctcctgtttttgctgcatcttgaaacactgcaagaaaccgttgtggactgcatgattcagcaaaatgtaatgaccattacggttgagactgattttgagcttcaggcggccatcgaccctctcgtaccggctttaaaagaagctgtaaaagaaacgggcttcagcctgtcaggcgtcacggctaaaaaacggcgcccgaaagaccagagcgctcttgtggaagagtttatagaaaaagacggcggaagaaaagtggatgtgaaaatatgaaagagcaaacgccgttaagaagagctgtcgccctgcattacgaccggcagaaagaccaagccccgaaggttgtcgcaacaggcagggggcacgtggcggaaaatattataaaagaagctgagaaggctggggtccccattcaggaagaccgaacccttgtcgaattaatgcgccatttgacggttgacgatcagataccggaggcgctttatgaaaccgttgccgaaattttttcatttgtttacagactggacgaaaccctgaaaaacgaaaaataaggaccattcatttcccggactccgtttaaatttatattttcaataaaataaaagttagaatgtttggaaggatataaagattttgttttgaaccctagacaattcttccagtattatatagaatgaaagcgcagtctatttttagttttgctacataagttaggaggatgggaaatgaatatccatgagtaccagggaaaagaagtcctcagaaaatacggggtgtctgttcctgaaggtaaagtggcttttacagcagaggaagcagttgaaaaagcagagggcctgtcaagctcggtttatgtcgtaaaggcgcaaatccatgctggcggccgcggcaaagctggtggggtaaagattgcaaaaacaaaagatgaagtgaaagagtatgccgaagaactgttaggcaagacgctcgtcacacatcaaacgggtccggacggacaagtaataaaacgcttacttattgaagaaggctgcgatattaaaaaggaatactatgtcgggcttgtacttgaccgcgctacttcaagaatcgttttaatggcgtctgaagaaggcggaacggagattgaagaagtagcggaaaaaacacctgaaaaaattaaaaaagcggtaattgatccggctgtcggccttcagggctatcaggcaagggaaattgcattcgcaattaacatcccgaaagagcttgtcggcaaagccgctaaatttatgctcggtttatataaagcatttgttgagaaggactgctccatcgccgagatcaaccctctcgtcgttacgggggacggaaacgtcatggcgctggatgctaagctgaacttcgacagcaatgcgttatacagacaaaaagacattatggaatacagagatttagatgaagaagatccgaaagaaatcgaagcgtcaaaatacgatttaagctacatttcccttgatggaaatatcggctgcatggtaaacggcgcgggtcttgcaatgtctacaatggatatcattaaacactacggcggagaacctgcaaacttccttgatgtcgggggcggcgcaaccgcagaaaaagttacggaagcttttaaaatcattctttccgatcaaaacgtaaaaggaattttcgtcaatattttcggaggcatcatgaagtgtgatgtcatcgccgagggcgttgttgaagcgacgagacaagtcggattgacattgccgctggtcgtgcgccttgaagggacaaacgtagatttaggaaagaaaatcctgaatgaatcaggcttaaacatcacatctgcggaatcaatggcagacggcgcacagaaaatagtatccttagtttaggaaagaatgaaaggcaggggaccagataatgagtgtttttatcaataaagatacaagagttattgtacaggggattacaggttctaccgctttatttcatacaaagcagatgctggaatacggcacgaatatcgttggcggtgtaacacctggaaaaggcggaacggaagcggaaggcgtaccggtattcaatacggtcgcagaagcggttcatacaacgggcgcagatgcgtcagttatttacgtgccggctccgtttgcggcggacgcaattatggaagcggttgacgcggaaattgatcttgtcatttgtatcactgagcacattccggttttggacatggtgaaagtgaagcgctttatggaaggcaagaaaacgagattaatagggccgaactgccctggtgttattacacctgaagaatgcaagatcggcattatgccgggatacattcataaaaagggtcatgtaggcgttgtgtcccgttcaggaacattgacatacgaggccgtccatcagctttcagaagccggcgtaggccaatctaccgctgtagggatcggcggcgatccggtcaacggcacgaactttattgacgtgttaaaagcgttcaatgaagatcctgaaacacatgccgtcatcatgatcggagaaatcggcggaacagctgaagaagaagcggctgagtgggtgaaagcgaacatgacgaagcctgttgtcggctttatcggcggtaaaaccgcgcctccgggaaaacgcatgggccatgcgggcgccatcatctccggaggaaaaggcacggcagaagaaaaagtcaaaacgatgaacgcctgcggaattgaagtcgcggaaaccccttctgtaatgggtgaaacgctgattaaggtgttaaaagaaaaaggcttgtttgaaacgtgcaaaactcactgatcgaagcaggggcagccgtaacggctgttcctgtttttgctgaaaaaaagaggaggtttccagatttggatcaagcatcgcgctgtttaatggtctgcagtattaatcaaatcatctccccgtctcttctattaaaatggtggaaagctgatcattctctgtcttttttaccggatccgcatccattaactgttttatcagaagggaaaacagccccggaagcaatttttcgggaaatagagcgcaaggatccggaacttgatgaagttctgtccgattaccgccgcgaaggcattactgccattccgatttcatcaagccgctatccaacatggcttaaagcgatttatgatccgccggctgtcttgtatgcaaaagggaacccgctgcttcttgaaaaaggcagaaaaatcgggattgtaggaacgcggaaaccgacggaagacggaataaaagcggttgggcatctttccgccgaactctcaaaaaaaggctgggtcattgtaagcgggcttgcatccggtatagacggattgtctcataaggcgagcatcagggcaaaagggcttacgatcggcgtgatagcgggcggattccatcacatctatccccgggaaaatctcctgttagcagaatacatggctgaacaccatctcctactctcagaacatcctcctgaaacaaagccgaaaaaatggcactttccgatgagaaaccgcataatcagcggattaagtgaaggaattgtggtcgtgcagggaaaagaaaaaagcggttcattaatcacagcttaccaggctctcgatcaaggcagagaggtatttgccgttccgggttccatatttaatccatattccggaggacctataaaactcattcaagaaggggcgaaagctgtattatgcgcagaggatattgacggagagctgaccgcccgatgcgttcagtatacggaacccttttgaaatatcgtttgacaaacggtattgtaatatttaataatagtgaggatttaaagttgcacattattttcatgtataaaatgacgttcatcataaagaatgaaatgttgaaagccataaaaaggcagctctaaaatgaattgatacttgaaaagagagagaacacctcttgagggggatgaaaatgtctgattatctagtcatcgtggaatcgccggcaaaggcgaaaacgattgaacgttatttagggaagaaatataaagtcaaagcttcaatgggacatgtccgggatcttccgaaaagtcaaatgggagttgacatcgaacagaactttgaaccgaaatatattacgatccgcggaaaaggccctgttttaaaagaattaaaaacagcggcaaagaaagcaaaaaaagtctatctcgcggccgaccccgacagagaaggggaagcgattgcatggcatctcgcacacagtcttgatctggatctcagctcggactgccgggtcgtctttaatgaaataacgaaagacgccattaaagaatcatttaaacatccgcgcatgattaatatggatcttgtcgatgcgcagcaggcgcgccgcatactagacagactcgtcggatacaaaatcagcccgattctttggaaaaaagtaaaaaaaggcctcagtgcgggccgtgtgcaatccgttgcactccggctgatcatcgaccgggaaaaggaaatcaacgactttaaacctgaagagtactggacgattaccggctcatttttaaagggaaaagagacgtttgaagccggatttttcggaaaaaacggcaaaaagcttcctttaaaaagcgaagaagacgtaaaagccatccttgctcagctgaaaggtaataagtatacagttgacaaggttacgaaaaaagagcgcaaacgaaatcccgctctgccgtttacaacgtccactctgcagcaggaggctgcaagaaagctgaatttcagagcgaagaaaacgatgatgatcgcgcagcaattatatgaaggaattgatctcggcaaagaagggacagtcgggctcatcacgtatatgagaacggactcaacgcggatttccaatacagccgttgaagaagcgtcagcttttattgatcaggcgtacggaaaagagtacttagcgggaaaacggaaaccggcaaagaaaaatgaaaacgcacaagatgcccacgaagcgatccgcccgacttcggtgctcagaaaacctgccgacttaaaagcggtgcttggaagagaccagctcagattatacaagctgatttgggagcgctttgttgcaagccagatggcccctgccgtccttgatacgatgagcgtcgatctcagcaataacggattgacattccgggcaaacggaagtaaagtcaaattcgccggcttcatgaaagtctatgtagagggtaaagacgatcagctggaagaaaaagaccgcatgcttccggaccttaaagagggagacacggttttatcgaaagatattgagcctgagcagcactttactcagccgcctccgcgttatacagaggcgcgcctggttaaaacgcttgaagaactggggatcggccgtccttcgacatatgcgccgactcttgacaccatccagcgccgcggttacgtgggattagacaataaacggtttgtgccgactgagcttgggcagatcgtgctggatcttatcatggagtttttcccggaaatcattaacgttgaattcacggctaaaatggaaagagaccttgaccatgttgaagatggccagacagaatgggttcaaatcattgacagcttctataccgatttcgaaaaacgcgtgaaaaaagcggaagccgaaatgaaagaagtggaaattgaacctgaatacgccgatgaagattgtgagttatgcggctcccggatggtttataaaatgggccgatacggcaaatttatggcgtgctccaatttccctgactgccggaatacaaaaccgattgtcaaacaaatcggcgtaaaatgccctaagtgccatgaaggaaacattgtcgaacgaaaatcaaaaaagaaacgcatcttttacggctgtgaccgttatcctgaatgtgacttcgtatcttgggacaaaccgattgaacgaaaatgcccgaaatgtgaaaatatgctcgtagagaaaaagcttaaaaaaggcatacaagtccaatgcgtcgaatgcgattataaggaagaaccacagaagtagcggtgagcagagccttgctcaccttctttgtgtggaagggacaaacaacaggagatgaaaagaaatgaaccagcaaacagttaatgtaatcggagcaggccttgccggaagtgaagcggcatggcagcttgcaaaacgaggaattcaagtgaaactatatgaaatgcggcccgtcaggcagacggcagcccatcatactgataaattcgccgaactggtatgcagcaactccctccgttcaaatacactcgccaatgcggtaggcgtattaaaagaagaaatgcgggcccttgactcggcaatcattcaatctgctgataaatgctcggttccggccgggggagcgcttgccgttgaccgtcatgaatttgcgcaaagcgtgacggatctcgtgaaaaaccatccgaacgtaacggttcttactgaggaagtaacagagattccggaaggcccgactgttatcgcgaccggaccgcttacgtcagaatcgctttcacagcagctgaaagagctcacgggagaagagtatctgtatttttatgacgcggcggcgccgattgtcgaaaaagacagcctcgatatggagaaagtgtacttaaaatcccgttatgacaagggagaagcggcgtacttaaactgcccgatgacagaggaagagttcgaccgtttctatgaagcattgacgacggctgagacggtacctttaaaagaattcgagaaagaaatcttctttgaaggctgcatgccgattgaagtcatggcgaaaagaggcaagaaaacaatgctgttcggaccgatgaaaccggtcggactggaagatccgaaaacaggcaagcgcccttatgcagtcgttcagctcagacaggatgatgcggcgggaacgctttataatattgtaggttttcagacacatttaaaatggggagaccaaaaagaagtgcttaaactgatccccggtcttgaaaatgttgatatcgtcagatacggcgtcatgcacagaaacacatttatcaactcgccgagccttttgaatccgacatatcaatttaaacagcggaacgatctgtttttcgcgggccaaatgaccggcgtagagggttatgttgaatctgccgcttcaggtcttgtagcgggaatcaatgccgccaaacttgtgctcggtcaggatcttgtgacattcccgcaggagacggcgataggaagcatggctcactacattacgacgacaaatcagaagaacttccagccgatgaatgcaaacttcggcctcttaaaagaattgcctgtaagaattaaaaacaaaaaagaacgaaatgaagaatacgctaaacgcgcaattgagactattcaaactatttcgaaaacgatatagcttttcattgcaacttcgatgcattatatgataccatttaaaagcccttcggagagggaggtcttcataatgactgagaatgttaacttttttttaaagttattcgttgaatatttacaaattgaaaaaaattattcacaatatactattgtgaattatgttaattcgattgaagaatttgggatgtttctgcatgctcaaaatataaatggaatgaaagaagctgcatatcatgatgtgagaatatttttgacagaggcttatgaaaaaggcctgtcaagaaaaacaatcagcaagaaaatttcagctttgagaagcttctataaatttttaatgagggaaaagcttgttgaagagaatccgtttcagcttgttcatctgccgaaacaagagaaacggattccgaagtttctttatgaaaaagaacttgaggaactattcgctgtttcagacagaagtcagccgtcagggatgcgcgatcaggccctgcttgagcttctttatgcgaccggaatgagggtcagtgagtgctgtacgctcactgtcagcgatcttgacctgttcatggatacggtgctcgttcacgggaaaggcaagaagcagcgctatatcccgttcggctcatatgcccgtgatgcgctggagctgtatatcaacagcggaaggcagtgcctgcttgaaaaagcaaaggagcctcatgatgtgctgtttgtcaatcaaagaggcggcccgctgaccgccagaggaatccggtatattttaagcgggcttgtaaaaaaagcatccggcactttacatatacacccgcatatgcttcggcacacgtttgcgactcatctgctgaatgaaggggctgatttaagaagcgtccaggagcttttgggccattccaatctgtcttctacgcagatttacacgcatgtatcgaaggaaatgctgagaaacacatatatgtcccaccacccgagagcttttaaagaaaattaaaaggaggcccttctcatgtcatcttttcatgcgacaacgatttttgccgtccagcataacgggaaaagcgctatgtcaggagacggccaggtcacattcggtcaggctgtagtcatgaaacatactgcaagaaaagtgagaaagctgtttaacggaaaggttctggccggatttgcgggatctgttgcggacgctttcacactttttgaaatgtttgaggcgaagcttgaagaatacaacggcaatttaaaacgtgcgtcggttgagcttgcgaaagaatggcgcagcgataaagtgctgcgcaagctggaagccatgctgattgtcatgaaccaggataccttgcttctcgtatcgggaacaggtgaagtgattgagccggatgacggcattttggcaatcggctccggcggaaactacgccctgtcagcaggaagagcgctgaaaacctatgccggagagaatctgtccgccaaagatattgcaaaagccgctttgaaaatcgcgggcgagatttgtgtgtacacaaacgatcagatcattttggaagaacttgaatagaaaggacttgaggcgcatggaaaacaaaccgttaacaccgagacaaatcgtagatcggttggatcaatacattgtaggacagcaggatgcgaaaaaagctgtcgccgtggcattaagaaaccgctatcgcagaagtcttcttgatgaaaaactgagagacgagatcgttcccaaaaacatcctgatgatgggcccgaccggggtggggaaaacagagatcgccagacggatcgccaagcttaccggtgcgccatttataaaaattgaagcgacaaaatttacagaagtcggctatgtaggcagagatgtcgaatcaatggtcagagacctcgttgagacatccgtgcggctcattaaagaagaaaaaatcagcgaagtgaaagaacaggctgaagaaaatgcaaacaaacgtatagtgcggcttctcgttccgggaaagaaaaaacaagcgggtgtgaaaaatccgtttgaaatgcttttcggaggaaaccaggcggcaaatgatgatgaagccgaccagcaggaagaagcaagccttgaagagaaaagaaagcgcatggcgcatcagctcgcattgggagagctcgaagaccattacgtctccgtagaggtggaagagcagcagccgtcgatgtttgacatgctgcaaggctccgggatggagcagatgggcatgaatatgcaggatgcgctgagcaatctggtgccaaaaaagaaaaaacgccgcaaaatgacggtcagagaagcaaggaaggttctgaccaatgaagaggcaggcaaattaatcgatatggatgaagtcggccaagaggccgtgttaagagctgaagagggcggcattatctttattgacgaaatagataaaatcgcaaaaaacggaggggcttcttcctcagcagatgtatcgagagaaggcgttcaaagagatatccttccgattgtcgaaggatctaccgtcgtcacgaaatacggctccgtcaaaacagatcacgtgctgtttatcgcagccggggcattccatatggccaaaccgtctgatctgattccggagctgcagggccgctttccgattcgtgtagaattgagcaagctgacggtagatgattttgtgaagattctcgtcgaacccgataacgcgctgttaaaacaatatcaggctttattgcagacagaaggtatatctcttgaattttctgacgaagctattcgtaagatcgccgaagtggcttatcatgtgaatcaggatacggacaacatcggagcgagaaggcttcacacgatattggaacgtctcttggaagacctgtcgtttgaagcgccggacgtaacgatggaaaaagtcgctatcacgccgcaatacgttgaagaaaagctcggaacgattgcaaacaacaaagatctaagtcaatttatattgtgaaaatttaataagaggaattctaggaggattatttatcatggctttactacaaaaaacacgaattattaacagcatgctgcaggctgcggcaggcaaacccgtaaactttaaagaaatggctgaaacgcttcgtgacgtcattgattctaatattttcgtcgtcagccgcagaggaaagcttttgggctactctattaatcagcagattgaaaatgaccgcatgaaaaaaatgcttgaagaccgccagttcccggaagagtacacgagaaatctgttcaatgttccggagacgtcttcaaaccttgatatcaacagcgaatacacggcgtttcctgtagaaaacagagacctgttccaagcgggcttaacaacgatcgtgccgatcatcggcggaggagagagactgggcacgctcattctgtcccgtctgcaggatcaatttgaagatgatgatctcattcttgctgaatacggagcaaccgttgtaggaatggagattttaagagaaaaagcggaagaaatcgaagaagaggcgcgaagcaaagcggttgttcaaatggcgatcagttctctgtcttacagtgaacttgaagcgattgagcatatctttgaagagcttgacggaaacgaaggcttgcttgtggcaagtaagattgccgaccgtgtcggcattacgcgttcagtaatcgttaatgcgctgagaaagctggaaagcgcaggtgtcattgaatccagatcactgggaatgaaggggacgtacattaaagttctgaacaacaaattccttatcgaattggaaaaccttaaatctcattaagacaaaagcaggatccctaaaaatggaggtcctgctttttttatggacaataggtgaaaagttgcagtttaaagttgcttattggaatctgatctgagataatccatcttgctgtgtgaaaataaggggaagatacagaaattcggctattttcagtcttatattaatcaaatatttgtagtccaaatactctaggactttatacctatgtgtaaaatggatacaaatgagtacttttttttagcctaacttcatagactttaagcctgttatttcttacaataagcatatggttttacaattctcgacaaggatttttaggagaaaaatatctgaaatggaggtaagtggatttggacttattttctggaactatacaaaatcttgagaatgccttggggagagcggacattaagcaaaaagtcttaactaataacatcgccaatatagatacaccgaactataaggcaaaaaaagtctctttccgaaatttgttagatcaggaaacatccaatcttgaggcggtaaaaaccgactatcggcacgttgactttacgggttcaggggacgattattctatcgtgtccggcagtgatacatcgtaccagcaaaacggaaacaatgtcgatatcgacaaagaaatgacagatttagccgaaaaccaaattaattatcaggctttggttgaaagaatgagcggcaaattcaattctctgaaaaccgtcttgacaggaggaaaataatgagtggctttcaaagcttaaatatttcgggctccgctttaactgcacagcgtgtccggatggacgtcgtatcgtccaacctggccaatatggatacaacgagagcgaagcaggtaaatggcgaatgggtgccttacagaagaaagctggtatctctccaatccggaggcgaatcattttcgtcccttttacattccaagatgaacggaacaggaagcgcgggaaatggcgtaaaggtatctggtgttacggaagacccgtccgcttttaatctcgtttatgatccggagaatcctgatgcgaataaagacggatatgtacaaaaaccaaatgtagatccattaaaagaaatggtggatcttgtcagcagctcgagatcatatgaagcaaacgtaactgcattaaacgcctccaaaggcatgcttttgaaggcgttagaaatcggaaagtaaggtgatgtaagtggttaacgctattactccttttcagcttcaacaaacccaaaatactcaaaacgtaacgaatcaattaaaccaaactcaaaaaactgattcttcaaaccaaacaagcttttcggagcttttaaaaaactctattgattcgttaaatgagtcacaagtgaaatctgaccaaataacgaacgaactggctgcaggaaaggatgtaaaccttgacgaggtcatgatcgctgcccaaaaagcaaatatttctctgacggccgctaccgaattccgcaataaagccgtggaagcctatcaggaaatcatgagaatgcagatgtagtggtcagattgaagagaatgactggaatgaccgggggttaacatgaatcgtactctaatgcaaatgaaaaccaaaacggcagcgttttggaacaacagatcaaaaacacagaagatactcatggtaagcggcttggccgcattcattattttactcatcgtcgttattatttttacttcgtctgaaaagatggtgcctctttataaagatttgtccgcggaagaagcggggaagattaaagaagagctcgatacgaaaaaggtgtcttctgaacttgctgacggcggcacggtcattaaggttcctgagagccaagtggattcgcttaaagtccagcttgccgcggaaggcctgccgaaaacgggatcaattgattattcgtttttcggacaaaatgcgggcttcggcctgacggataatgagtttgacgttttaaaggttgaggcgactcagaccgaattgtcaaacctgataaatgaaatggacggtattaaaagctcgaaggtcatgatcaatatgccgaaagaagccgtgttcgtcggtgaagatcagccggcagcgtccgcatcaatcgttttgcagatgaaaccgggctactcgcttgatcaaaaccagatcaacgggctgtaccatctcgtttctaaaagtgttccgaacttaaaagaagataatatcgtcataatggatcaaaattctacatattatgacaaaagtgacagcggtgcagggtccgtttctgacagttatgcttctcagcaaggtattaagtcgcaggtcgaaaaggacattcaaaaacatgttcagtcactgctcggcacaatgatggggcaggataaggtcgttgtttccgtgacggcggatgttgacttcacgaaggaaaaacgcactgaagacactgtcgaacctgtcgataaagataacatggaaggcatagcggtaagcgccgaaaaagttgcggaaacgtataaaggcgacggcgcggccaacggcggcacggccggaacgggaagcaatgacaccgcgaactatgccgagacaaacggcggttcaaacagcggggactacgaaaaaagcagcaataaaatcaactatgaagtcaaccgcattcataaagaaatcgcggaaagcccgtataaagtgcgtgatttaggcattcaggtcatggtggagccgcctaatccgaaaaatgccgcttccttatcagcacagagacaggctgatatacagaagattttaggaacggtcgtcagaacgtctcttgataaaaacgaaacgcaaaatcaaaacctgacagacaatgatatcaacaataaaatcgttgtatccgttcagccgtttgacggaaaaacaagcctgaacacagattcggcacaatcttcaggtcttccgatctgggtatacattacaggcggcgtactgcttgcggccattattctgcttattattctcctcatcagaaagaaacgctcacaagaggatgaatacgaagaatatgaatatgaaacaccgcccgagccggttcgattgcctgatatcaacgaagagaaaattgaaacggaagaaacagtcagacgaaaacagcttgaaaaaatggctaaagaaaaaccggaagactttgctaaattgcttcgaagctggctggacgaggattagggggaatggaaaatggcgaaacgtgatcagaacaagcttacaggaaaacaaaaagcagccatcctcatgatttccttaggccttgatgtatcagcttctgtgtacaagcatttgtctgaagaagaaattgaaagattgacactcgagatttcgggagtcagaagcgtcgatcatcaaagaaaagatgaaatcattgaagaatttcataatatcgcaatcgctcaggactatatttcacaaggcggtttaaattacgcccgccaagtgcttgaaaaagcgctcggagaagacaaagcggtaagcattttaaacaggctcacctcttctttgcaggtaaagccgtttgatttcgcgagaaaagcggagcccgaacagattttaaatttcattcagcaggaacatccgcaaacgatggcgctgattttatcctaccttgacccggtgcaggccggacagattttgtctgagctgaacccggacgttcaggctgaggtggcaagaaggattgcggttatggacagaacgtctcctgaaatcataaatgaagtggagcgggtccttgaacaaaagctgtcctcctcctttacgcaggattatacgcagaccggcggcatagaagccgttgttgaagtgttaaacggtgtagacagaggaacggaaaaaacgatccttgattcattagaaatccaagatcctgaattggcggatgaaatcaaaaaacgaatgtttgtctttgaagatattgtcacccttgataaccgtgcgattcagcgcgtgatcagagacgttgaaaacgacgacctcctgctttcattgaaggttgcgagcgaggaagtcaaagaaatcgtcttcagcaatatgtcacagcgtatggttgaaacgtttaaagaggaaatggaaattatggggcctgtgcgtttgcgtgatgtggaagaggcgcaatcaagaatcgtgggcgtcgtccgcaagctggaagaagccggagaaattgtaatcgcgcgaggcggaggagacgatattattgtctaatatcattaaacagcaatcatcattttctcctgaacaaaaacggcgcaagctttccttgcaggaagtcaggaaaacacattcccatccagaccgggaggaacccgaaaatccggaggctctcatggcttttgccaaagcagaagccgacagggtgtctgaagaagcgaaaaatcaatttgagcacactcttcggcagattgaagaagagaaaaaccgctgggcggaagaaaaacaaagattgatagaagaagcaaaggcagaaggatatgaagaaggcatggcattgggaaaagccgaggctcaagctgaatacgccaatctcatcagccgggccaatgccgttatggaaatggcgagacagtcagtcgaggaaaaactggaaagcgctgaggaagaaatcattgagctttccgttgcgctcgctaaaaaagtatggcggcaaaaaagtgatgataaagaggcttttcttctgctggtcaaacaggtagtagccgaagtaaaagattatgatgacatctccatctatgtggaccctgaatattatgagacggttcatcagcatatggacgaaattcagcagctgttatacaaagaatgcagattaagcttatatgccgatgaaaaagccgcgaagggagcgtgctcgatagaaactccgttcggacgtgttgatgcaggcatagacacccagctgatgcaattaaagcaaaaacttttaacggcgcttgaggcgggagcggagcaatgaagacacagtatttaatagactcaattgaaacagcggatccgtacaagcgctacggcaaggttaaacgggtcatcgggctgatgattgaatcaaaagggcccgaaagctcaatcggagatgtttgtctcatttatccgaaaggccatgcgaaaaaagcgattaaagctgaggttgtaggcttccaagatgaaaacattctgttaatgccttatctggaagcggccagcattgcgccgggcagcattgtggaggccactggggagtcgctccgcatcaaagtaggcgcgggtttaatcggacaagttgtcgacgcgttcggcgaacctcttgacggccgggcgcttccgaaaggtttgtcccccgtttcgacggaacagccgccgccaaacccgatgaaacgcccgccgatacgggaaaagatgggtgtcggtgtcagatcgattgacagtctgctgacggtaggaaaagggcagagaatcgggatttttgccggaagcggagtcggaaaaagcaccctgatgggaatgatcgcgaagcagactgaagctgatttaaacattatcgcactcgtcggggaacgggggcgcgaggtgcgtgaattcatcgagaaggatttaggcgaagaaggcctgaaacgctcgatagtcgtagtcgcgacctctgatcagcctgccttaatgcgtttgaaagcggcgtatacggccaccgccattgcagagtacttccgggataaaggccggaatgtgatgttcatgatggactctgtcacgagggtcgcgatggctcagcgggaaatcggcctggcagcgggagaaccgccgacaacaaaaggatatacaccttctgtgttcgctattttgccccgtttgctggaaagaacgggcgcgaatgaacaaggaacgataaccgctttttatacggttctcgtagacggagatgacatgaacgaaccgattgccgatacggtgcgcggaatattagacgggcatatcgttctcgatcgggcgcttgccaacaaagggcagttcccggccgtgaacatcctgaaaagcatcagcagggtcatgtctaatatttcagacacatcgcatatagaggcggccaacaaattccgcgatcttctgtcaacttatcaaaactctgaagatctcattaatatcggagcttacaaaagagggtcatctagagaaattgatgaagcgattcagttttatccgcagcttattcaatttttaaaacaaggaacggaagaacctgctcaattggaagacagcattgcggcattgacgagtctgacaggaaaagaggaataaacatcgtggcataccaattcagatttcaaaagctgctggaattaaaagaaaatgaaaaagaccaaacattgactgaatacagacaatcggtttctgaatttgagacagtggctgaaaaactatatgaaaatatgagcaaaaaagaattgctcgaaaaagacaaagaatcaaagctgaaatgcgggatgagcgttcaggaaatgagacattatcagcaattcgtttccaatcttgagaacaccatctatcattatcaaaagcttgtcatcatgaaacgaaatgaaatgaatgagaagcaggaacagctcaccgaaaaaaacattgaagtaaagaaatttgaaaaaatgcgggaaaaacaatttaatatgttcgcacttgaagacaaagctgcagagatgagggaaatggacgacatttcaatcaagcagtttatgattcaggggcattaggagcgaatgaaatggccgataaagaaaagagatctggaaagttcggttcaatcctgctttttatcatgatcccgctgatttttctgatcatcgtcgcaagcatcatcctttgggctgccggcgttgatgtgatgaagccgattcaggaaacagccgctaaaacgcctgttttaaaagaattggttcccgaaacgaaagaaatgaaaagcgcggcggaaaagcagaaggaagacagaacggcttctcttgaaaagaccataaaggaacaaaaaagtgaaattaacattttgaataaagatttagacacaagcaagtccgaaatcgataatctgaatcagaaaatccgttcactgaaacaggaagctgaacagcagcagaaaacgaagacggatgaaatgaaaaaagacgcttcggaatcagccggaaaagataaaatgatcaacatctataaaagtatggacagcggtaaagcggcaagcattatcgtaaagctgaaagaaaaagaagccctcgatattttaaacggattaagtaaaaagcagcttgctgaaatcttgacgaaaatgactcctgaacaagcggctaaatatacagaaaaactatccgctgacggaaataaggagtgatgtaagttgaagctgcttgaattaacgggtaatcgtacgcagactgtgcaaaacagcaatgtgaagatgaatgtaaacagcttaggtctatttcagaactggctcctgtcggaaatcacttctccccggcagcccggagatgaaacaaaaacaagtgacgcagagctgaatgatgccttatcgaaaatcggtgattggctgaaagccggcccggaagataaagaattgcagctaaaacagctgcttgaggcggtaaaagctcttgaaggaaagcagacggctgaaacagctcttcctttattgaaacagcttgccgaatctgttgaagacatgttagcgggaaaacagcatggagcgaagcctgaaacggatgagccggattcttccgcaaaagacggggattccgtcaaggatgcgcttgagaagggcctgcttttcattcaagaagccgtatcccagctcttcacatctcagcaggaactgccggacagcgcgcaggcaaaggcggtttaccaggaaggcgcccgtttattagaggcattgaaaaaacaaggtgtcccagaccgcgtgattcaagacctgcggcagacattttttccgaaaaacgaatctgcatctaaactttactccatgacagccgctgagctgaagagctttcaaagcgtcgcggagcagcttgcgggcctttctcaaaagggaacaaaggaatgggatatggctgaaactgagctgaaagcttttgtgttatctcaatcatctgaatcatcccaagagtcagccgggaaaacagaacagcaaaacggcggcacggtttctcacgcaaaggcgcctgacagcaaattgtctgcacatatactgttttcgggaacgagaagccttgccggcattcagcaaacgtccgcaggaactgaacagcagccggcagaaaataaaccgttaacggatcaggtcataagcggctggaaacagatgaaatacacgcctttcgggaaaacaaccggaagctttacgattcgtcttaatcccgagaacctcggatttgtcacaattaaggtgacaaacgaaaacgggatgtttcaaagcaaaataatcgcatccagccagtccgcgaaagagctgctggaacagcatcttcctcagctgaaacaatcgcttccgaatatgtcggtccaggtcgaccgttttacagtcccccttcaaagcggggatcagcagcctgtttacgggcagacggccgatcacaataaacagcagcatcagggacagagagagcagaagaaccagcagcagtcaggcgatttcggagatatgctggaggagctttctctcaatgaaatggaggaagaatagttgacatcagtaaactcggattatgccgcggcgggcgcttcaaccacttcaagcgcgaagagcaccgccgcagtaaacagcagcacgaatttagggaaagacgaatttctgaagatcttaatgacacaggttcaaaaccaggacccgctcaatccggttgatgacaaagaattcatcagccagatggcgacattttcttcattggagcaaatgatgaatatgaatacgacgatgactaaatttgtagaaaatcaagatccgtttacgatgtatgtgaactggatcggcaaaaatgtcacattcagcgacagcgacgggaaggatcagacaagcccagtcaattcagtcaagcattcaaacggcaattacgtgctcgtgcttgaaaacggcaaagaggtcagtccgtggaatgtcacggccgtcagcgaaacatctaaataataagaaactcagggggaatttaacatgttacgttcattatattccggtatcagcggcatgaaaaactttcagacaaaactagatgtaatcggcaataacatcgccaacgtcaacacagtgggatttaagaaaagccgcgttacatttaaagatatgatcagccagacagtcgccggcggttcaaacgtgaccaattcaaaacaaatcggcttgggtgccgcgacttcttccattgatgttgttcattcaaccggcgccccgcaggctacacagaataaaaccgacctagccattgacggagacggctactttcagattaatacaggtgcgggaattgtttacacacgtgcggggaatttcggaaaggacaatcaagggaaccttgttacgactgacgggtactaccttgaaaaaatcggcggcggtaaaatcaatattccgactgatgcgaaagattacagcatcggtgcagacggaaccgttacatacactgatgcaggggatgaggttcatgatgccggacaaatcggtctggtcacgttccctaacagcgcaggtctggaaaaaatcggaggaaacctttacagagaatcattaagttcaggagctgcgagcgcagtcaccactccgggcgaaaacggaacgggtaagcttttggcaggctatcttgaaatgtcaaacgtagatctgacagatgaatttaccgaaatgatcgttgctcagcgcggtttccaatcaaactcaaaaatcattacgacttcagatgaaatccttcaggagctggttaatctgaaacggtaaggagggaggagaggcggttaggccgcttctccggattgcatgattcaagtcacccgtttaaacggccagccttttacgctgaacgcgctgtttatcgaacagattgagtgcttccccgacacgacgattacactgtccaacggcaaaaagttcgtagtgaaagaaccggaagaagcagttctcaaaaaagtcatatcgttttaccatagcatacaaatattttcactggatcagggaatagaggaagaagaatgaagaaaaaattagtcatcattttgctgattattttaattgtcatcgccggcctcggaacggcagcatattttgtcgtcagcggacattccggcaaagataaaaagccgacaattgacgaagtcgttgcagccactgtgtctgtcgacgatatcacgacaaacttaaagtctgacagcatcatccgtatcggcatcaagcttgaaaccgactcggctaaagcgaaggaagaacttgaaaaacgcgattttcaggtgaaagacaacatcatttccattttagctgacacaagcgccggagagattgagggagataaaggaagagaagcgtttaaacaatcattaaaagagaaagtaaacagctatctccaagaaggaaaagttcagaaagtgtacattacctcctttaatctgcaataaaaacaaatttgacagaatacggaggtgaagaaaatgtcaggagaagttctctcccaaaatgaaatagacgcactgctttccgccatttccacgggtgaggcggatgcggaagagctgaaaaaggaagttaaagagaaaaaagtaaaggtatatgattttaaacgggctctcagattctcgaaagatcagatacgcagtttaacccggatacatgataactttgcgaggcttctcacaacacacttttccgccaagctcagaacgtatattcatatatccgtcagctcagttgaccaggtgccgtatgaagaatttatccgttccataccgaacatgacgattttaaatttattcgatgttcatccgatggaaggcagaatcatgatggaggttaatcccaccatcgcatacgcaatgcttgaccgcgtcatgggaggcatcggcatcactcataacaaagctgacagccttacggaaattgaaacgaatattatttctaacttatttgaaaatgcactgggcaactacaaagaagcttggcaatcgattgctgatattgaccctgaaatgactgaatttgaagtgaatcctcagtttgtgcagatggtttccccaaatgaaacagtcgttgtcatttctctcaatacacagataggtgaaatcagcggtgtcattaatctttgtattccccatgtcgtacttgagccgattatccctaagctttccgtacattattggatgcaatcagaccggaatgaagcgaagcccgaagaaacgaagttgcttgaaaagcgcatcatgacggctcaaattcccgttgtggctctcttgggcgcttctgaactgacaatagaagaatttttaagtttggaagtcggggactgtataactctggacaaatcagtgactgatcctcttactgtattggtcggaaacaaaccgaagtttttagggcaggccggccgggtgaatcgaagacaggcagtgcaaattttagatcacgacataagaggtgaacaagatgaacaatagattatctcaagatgaaatcgatgctcttcttaacggcacaagcagtcagtcagaggatacagaacagcctcaaggggcgaacttgtctgaacttgagcgcgatgcgatcggagaaatcgggaatatttcgttcggcagctcggctacggcgctgtccactcttttaaatcaaaaagtggacattacgacgccgagtgtgaccgtcatttcaaaaagcaaaatcagtgatgaatttcctcatccgtatgttgccattgaagtgaactacacagaaggctttgacggcagcaatttgctcgtcgtcgaacaaagcgacgcggccatcatcgcggatttgatgatcggcggggacggccggggcgccgatccgtcactcggtgaaatccacctgagcgccgtgcaggaagcaatgaatcaaatgatgggctcggctgctacgtcaatgtcgaccgtgttcagtaaaaagattgacatttctccgccaagggttgaacttctggatgtgacggaagaaaaagggactgacagaatacctgaggatgacctgctcgtaaaagtgtcattccgtctgaaagtcggcgaattaatcgattcgagcatcatgcagctttatccgattacgtttgcgaaagatctgatcgcagacctgatgactgcagaccagcatgagtcagaggccgcagaaaccgtatcagaaccacaggaaacatacgaaacgccgcagccggaacctgccatgcagccggagccgcaggcaaaacccgagcttccgaagagacagggaaccgcaaaaaaagctgctcctgttcaagtcgctccggtagaattccaggcgtttgatcataacgaagcggcgcaaggatcaaggaataaccttgatatgctgatggatattccgctttccgttacggttgagctcggcagaacgaagagaagcgtcaaagaaatccttgaactttctgcgggaagcattattgagcttgacaagctggctggtgaacctgttgacatcctggtcaaccagcggatcgtggcaaagggcgaggtcgttgtcatagaagaaaacttcggcgtgagagtcactgatattttaagtcaggcagaccgccttaacaatttaaaataagcgaacatagaggagagaaacattatggcacacagaattttaattgtagacgatgcagcatttatgagaatgatgatcaaggatattttagtgaagaacggttttgacgttgtagctgaagcttcagacggagcgcaggcagtcgaaaaattcaaagagcattcccccgaccttgtgacaatggatattacaatgcctgaaatggacgggattacagctttaaaggaaattaaacaaatcgatccgcaggcgaaaatcatcatgtgttcggctatgggccagcagtcaatggttattgacgcgattcaagccggcgcaaaagactttatcgtgaaaccgttccaagcggaccgcgtgcttgaagctattaataaaacattaagctaaagggtgtacgactgttgaaaaagagtcatggtttactagctttgatttgttgtttcgttttactcaatgtacatccgttccctgcttttgcggcggagtctgacaattccaccgtcaacgaatggtttgacaaacaatcaacaaacaaaacagagaaaaaaagcgatacatcgaaacaaacggctgatcaagagataggggatgcttctgcatcttctgtctccgcttttgattttgtaaagatgattggggcgttattattcgtcattctgctgatctatggatttgtcaaactgatgaatagaagaaaccgtctgctgaagccgtttcaatatgtagaaaatatcggcggaacgtcagtcggccaaaaccgttccgtgcagctgatcaaagtgggaaacagcgttctcgtagtcggtgtgggcgaaacgatacagcttttaaaagaaattgaagatgaaaaagagcgcgaggcgattctgagccaatacgaagagtcgatgtcttcaaaagtggaatggaccaagctcgtaaatccgcgtaaggatggagaaaaaaagccgcaaacgatgcttccgtcgttttcaaaagcgctgaaagaacagctgaacgagctgaaacaaagccgttctgaaggaaagaagaaaggcccttatcaccatgaatgaattcattaatctttttaattcaaacagtccgaccgaagtcagctccactgttaaattactgctgcttttgactgtcttttcagtggcgccggggattctgattttgatgacctgctttacgagaatcgtcatcgtcctgtcttttgtaagaacctcactggcgacgcagaacatgcctcccaaccaggttttaatcggccttgcgctgttcttgacgttttttattatggcgccgactttttcagagattaataaggaagccttaacgccgctgatggacaacaaaatcagtctcgatgaagcatatacaaaagccgagaagccgattaaagagtatatgagcaagcatacaaggcagaaggatctggcgctgtttatgaactatgccaaaatgaaaaaacctgaatcgattcaggatattcctttgacgacgatggtgcccgcttatgcgatatcagaactcaaaaccgcttttcaaatgggctttatgatttttattccgtttttaattatcgatatggtcgtggcgagcgtcttaatgtcaatgggaatgatgatgctaccgccggttatgatctctctgccctttaaaatattgcttttcgttttggtcgatggatggtatttaatcgtgaaatctttgcttgacagcttttagggtaggtgctaattgtgagttcagaatttgtaatttccatggcggaaaaagccgtatatgtaacactaatgatcagcgggccgctgcttgcgatcgcgctgatcgtcggtttgctcgtcagtatctttcaagcgacaactcaaatccaggaacagacgcttgcgttcattccgaaaatcgtggcggtaatgcttggactgatctttttcggtccttggatgctgtcgacgattctttcgttcacaactgatctgttctctcatctgaaccgatttgcagggtagaatcaaatgaattccatcattgatttatttcccgcttttttattggtctttatcagaatctctgctttttttgtaacggtgccggtgttcgggcatcggaatctgccggcggttcaccgaatcggctttgctttttttctttcggtgatctgcttcagcacgctgaaacatgcgccggaaatagaaataggggaacagtatatgcttcttgtcataaaagaggccgttgtgggcttgagcctcgggctgatcgctttcatgatgctgacagccattcagatagcaggttcctttattgattttcagatgggcttttccatcgccaatgtcattgatccgcaatcaggaacgcaaagcccgctgatcggacaattcgtttatacgctggcgctgttatttatgctcagcataaacgcccattatcttttgttggacgggatttattacagctttcagtatatcccgcttgatcaggcatttccgtcgtttggaaatgatcactttggactttttatcgcaaaaagcttcaatgccatgtttattatcgcttttcaaatgtctgcgccggttgtggccagtctgtttttagttgatttggcgctcggtatcgtggcgagaacggtgccgcagctgaatgttttcgttgtcgggcttcctctgaaaatagccgtgagctttattatgctgatcgtttgtatggcggtgatgtttgtcgttgtccgcaacatcttcagccttaccgttgaaaccatgcggaatctattggcattggtcggtgtgacatgatgaggctcagactgaatctgcaattctttgccggtgaaaaaacggagaaagccacgccgaaaaaacggaaggatacaagaaagaaaggacaggtcgcgaaaagtacggatgtgaatacagccgtttctttactgattatctttctttcgctgatcgcgctcggtccttatatgcgggacaggctgctgtcctttattaaaacgttttatacgaaatcgatatcattacatctgtctgcatctgccgtgcatgaactgttcgtggatacggtgaaagatatcagcctcatcctcgcgccgattatgctggtcgcgcttgtggcaggtgtcgtgagcaattacatgcaggtgggttttctgttttctgcggaagtcctcaagcctgacttgaataagctcagcccgctgaaaggatttaagcggatttacagcatgagggcgattgttgaactggtcaaatccattttgaagattactgtggtcggttttgccgcctttatggtgctctggctgcattatggcgatattctccgccttccgcttttgactcctgcggaagtgctcactttcgtttccaagctcactctttggatggggcttgcgggatcaggggctttaatgctgctggccgggcttgattacttatatcagcgttttgattatgagaaaaatatcagaatgtcaaaacaggatataaaagatgaatacaaaaaatcggagggtgatccgataatcaagtccaaaattaagcagaagcagcgggaaatggcgatgaggcggatgatgcaggaagtgccgaaagcggatgtcatcattaccaacccgacccattatgcgatagctttaaaatatgatgaaaagaaaatggacgccccttacattgttgccaaaggggtcgaccatctcgcattaaaaatcagacagatcgccaaagaacacgatgtcatgacgattgaaaacaggccgctcgcacgtgcgttatatgatcaggttgacattgaccaggccgtgccggaagagtttttcaaagtcattgcggaaattttggcttatgtatataaaacgaaacaaaaagtatagtgaatttcagattcaaaaggagagaaaaacagcatgtcaacaagagatttatcggttttaataagtgttgtcctcattgtggcaatgctggtgattccattccctccatggttgttaagtattttgatcatcattaatatctctcttgcgttgatcgtgcttctcaccacaatgaatatgcaagaaccgctgcaattctcgatattcccgtcattgctgctgttattgacgctgtttcggctttcgctcaatgtgtcgacgacacgttcgattctttctcacggagaagggggaaaggttgttgagacattcgggaatttcgttgtcggcggaaatgtgctggtagggcttgttgtcttcattatcttgattattattcagtttatcgtcattacaaaaggcgccgagcgggtatcggaagtggcggcgagatttacgctcgatgcgatgcccggaaagcaaatgagtattgacgcggatttaaatgccggcatgattacggagcaggatgcaaagcacagacgtgaaaaagtcgcccgggaagcggatttttacggcgccatggacggtgcgagcaaattcgtcaaaggggatgccatcgcggggatcatcatcgtgatgatcaatattattttcggaatcgtaatcggcatgctgcagcaggggatgagcatacaagaagctgcgtctcactttacaatgctgacggtcggtgacggtatcgtttctcaaatgccggccttgctcatttcaacggctacggggattgtcgtgacgagagcggcatctgaaggaaacctcggtcatgatattacaggccagctgtttgcttatccgaagctcttgtatgtagccgcgggaactgtacttttgctcggtcttcttacaccgatcggcattctgctgacggggccgatcgccggtctgcttgcattcggcgcttacatgctgtccaaagcggataagccgagcgaagaagaggaagaaattcttgaagaagaggctcaggcggatgaactgaaaagcccggaaagcgttgtgcagcttttacatattgatccgattgaatttgagttcggatacggactcgtgccgcttgcagacgcggggcagggcggtgatcttcttgaccgcatcgtcatgatcagacgtcagcttgcgcttgaattgggacttgtcattccggttgtgcgcatcagagataacatcgcgctccagccgaatgaatacagattgaaaattaaaggcaatgaagtcgctaaaggagagctcctgctagatcattacttagcgatgtcaccgacgcctgaagatgacgtcattgaaggaattgaaacgatagagccgtcgttcggacttcccgcaaaatggataagtgaagctgcaaaagatgaagcggacatgctggggtatacagttgttgatccggcgtcagtcgtatctacgcatattacagaaaaaattaagcagcatgcccatgaactggtcggcagacaggaaacaaagcagctgatcgatcatctgaaggaaaattatcctgtgcttgttgaggaagtcacgccaaaccctctttctgtcggcgatattcaaaaggtgcttgccaaattgctgagagaaaaagtttcaatcagaaacttggtgaccatttttgaaactcttgccgattacggaagattaacgacagattcagaccttttgacagaatacgcgagacagtcgcttgccaaacaaatcacggcacaatatgcgagagagcatgaaacgctgaaggtcatcacatgctcaggccgggtggaaaaagcgattgcagacggggttcagcagactgaacagggcaattacctgtcactcgaccctgaggtttcagacagcatcatccgttctgtcgctaaagaggccgagcagctttccatccgccaggagtcggcgattcttctttgctcgcctgctgtcagaatgtatgtaaaacagctgttagaacggtatttccctgatcttccggttctttcttataatgagctggaagcaaatgttgaagtacagagcattggagtggtggatatttaatgaaaataaaaaaatttacagccgcttcaatgcaggatgccgcgaagcaaatcaaaaaggaactcggcaatgatgccgttattttacattccaaacaagtaaagaaacgaaaatggctggggctgcggtcgcagcaggccgtcgaagtgatagcggttttagatcgtgacgtcagggaagcgagaaaaacgccgccggctgccgctgaagaagtgaaaaagacgaaaacggcggagaaagctgagcctgttcagccgccgcgtcttccggatcaaagtatttccggcgaactggcgcattttaaagaagtgctccctgaaccattaaaaaaagccgagagactattgaagcaagccgggcttcctgatcatacgcaaaacgccgtactcagtgaactgctccgttcttcaattgtttccggagatttaactgaagataatgtcagctccaaactgcaggatttgttagtgaaaaaactcccttcggcagacaggtggcaggaagggattcaatcaaaatacgtcgtgcttttcggttcaaccggggccggcaaaacgactacacttgcgaaactcgcggcctcatcaatgctgacagagcataaaaaaattgcctttatgacgacggatacttaccggattgccgcggtcgagcagctgaagacatatgcggagctgcttcaggctcctcttgaagtatgctattcaaaggaagaatgtctgaaggcactggaaaaattcgctgaatatgaccatgttttcattgatacagccggtagaaactttaaagaagagcagtatattacggaattacaagagatgattccgtttgaatcaggcttacaatcctttctcgtattatcggcatctgcaaaatatgacgatatgaaacaggtgctgaaacagttttcaggtgtgccggtcaatcaattcattttcacgaaaacggatgaaaccgcctcactcggctccgtgtttcaagtgctgtcggaatcaaggatcggcgccgcctatttgacaaatggacaggatgtgcctgaagacatcctatcggcttcaccaaaagagtttgtaaggatgcttttgacatgaaacccgatcaggcagagtcattaagaaggaaaatgagagagcggcaaatgatcaagccggagctttatgagaaaaaagcgaagacattagccgtcatcagcggtaaaggcggcgtcggaaaatctaatttaacattaaacatggcagttgccctgcaggaaaaaggaaaaaaagcactcatcattgatcttgacatcggaatgggcaacattgatgtgctgatcggcgctgcttcttcccgcaccattattgatgtgatggagaatcggcacgcattggcgcaatcactgtcctccggtccgaaaggccttcgctacatatccggaggaacggggcttgaggcgatctatcaagcagacggagagaagtgggcggcttttatgaatggtctttccgctgtattaagcgattttgattacgttctgtttgatatgggagcgggactttcaaaagaacagctgccgtttattttatcggcggaagacattctcgccgtgacaacgcctgagccgacggccattatggatgcctacagcgcgatcaaacatctcttgctcgcggatgaacggctgaccgtaaacattgccgtcaatcgcgcccgcgcccaaaaacaggcgctggacacgtacaaccgcctttctcatgcaattcacacgtttttaggcgcggaggtgcgtttcgccggctccatacccgatgacccgctagtaagtcaagccgtcattgaccaggtgccttttttaataaaaagtcctcaagcaaaagccagcaggtccgtccgtcttctgacggatgtcttgtttcaaacggaagaaaacaaaccaagagaagagaaaccggcatttattgagagattatcttcttttttattgaggaggactttacagtgattcgtgtgcttgtcgttgatgactcagcttttatgagaaagatgattaccgattttctggctgcggaagtgcagatagaagtcatcgggacagccagaaacggggaagaggcgctgaagaaaatagagcttctcaagcctgatgttgtcacgcttgatattgaaatgccggtcatgaacggaacggacacattgcggaagatcatcagcatatataaacttcccgtaatcatggtatcgagccagacacagcaagggaaggaccaaacgatcaactgtctggaaatgggcgcttttgattttatcaccaagccttccggagcgatttcacttgatctttataaaattaaagagcagctgattgagagggtgattgcagccgggctgtcctgcgcacaaaaacctgaggcggcagtgaaagagtcttctatcccggaacgtccggctttggcgggatttgaaagaccgaaagcaaaatccgccaagcaggccgtattcatcgcgacctctacaggcggaccgcgggctctgcaaaaggtgattccgaaactgccgaaggatttaaaggcgcctgtatttgtcgttcagcacatgcctgaaggcttcaccgcttcacttgcagacagactcaaccatttgtcagatattcaggtcaaagaagcggaaaacggtgaagaagcgaaagacggatgggtgtacatcgcgcccggcggaaaaaatatgacggttgcagaggaaggcggaaggctccgcatcattcttgacgttcatgatacggaaagccggcataaaccgtcagccgattatttgtttcggtcggcaagccgcttatccgattacgaaaaggtagccgtcattatgaccggcatgggcagcgacggaaccgagggcgtaaaagaaatgctcagaacaggcggcgttaaaacgattgcggaatcggacgaatcctgtgttgtgttcggaatgccgaagtcagcgataaaggcgggtctcattcatgagattaaacatgtggaagatatcgcggcatccatcaccggatgtgtgaaaaaagagagggtgtgaatcaattggatatgaatcaatatttagatgtctttattgatgaaagtaaagagcacttacagacatgtaacgaaaagctgctgctgttggaaaaagatccggcagaccttcagcttgtgcatgacatcttcagagctgcccatacgctgaaaggcatgagcgcaacgatgggatatacagatctggcgcatttaacccacctgatggaaaatgtgctggacgctatccgcaatggagaaatgcccgttacatcagattggctggacgtgctgtttgaagcgcttgatcatcttgaagagatggtgcagtccattattgacggaggagacggcaaacgtgatatttctgaagtgagtgcgaagctcgacgtaaatgcggtggtgcatgaaactgcggcttcagccgaaacagcagaaccgccggtttcaaaacaacaggcttcaactgaatggaattatgatgagttcgaacggactgttattgaagaggcggaagagcaaggattcagccgctatgaaataacggtttccctgaatgaaagctgcatgctcaaagccgtgcgcgtgtacatgatatttgaaaagctgaatgaagccggggaagtcgcaaaaacgatacccgccgcggaagtgcttgagacggaagatttcggaacggattttcaggtgtgtttcttaacaaagcagcctgctgaagaaattaaagaactcatcagcggcatttcagaagtggagaatgtcgaaatttctgccggtgcgccgttaaaaacggccgaaaaaccgcaagcggctgaaccggtgaaggaagctccggttaaaaaggctgagaaacagcctaagccgcaagcgaaaacggaagaacagccgaagcatcacagcggctcgaaaacgattcgcgtcaacattgaaagactggattcttcaatgaacctttttgaagaacttgtcattgaccgcggacgtcttgagcagatcgccaaagagcttgaccacaatgagctgactgaaaccgttgaacgcctgaccagaatctcgggcgaccttcagtctattattcttaatatgcggatggtgccggtagaaaccgtctttaaccgtttcccgagaatgatccgccagcttcaaaaagaattaaacaagaaaatcgaattgtccatcatcggagctgaaacggagctggaccgcacggtgattgatgaaatcggcgatccgcttgttcatttaatcagaaacagcatcgatcacggcattgaatcgcctgaagtacgggtgaataaaggaaaaccggaatcaggtcatgttgtgcttaaggcatatcacagcggcaaccacgtctttattgaggttgaagatgacggggccggcctgaacagaaagaaaattcttgaaaaagcgctcgagcggagtgtaatcaccgaacgtgatgctgaaacgcttgaagataatgagatttacgagcttatttttgctccgggcttctcgactgccgatcaaatttctgacatttcagggcggggcgtcggcctggatgtcgtaaaaaataaactcgaatcactcggcggctctgtcagtgtcaaatccgcggaaggtcaaggttctcttttcagtatccagcttccgctgacactttcaattatatccgttcttctcattaaactggaagaagagacgtttgcgataccgatttcttctattatagagacggctgttattgataagaaagatatcctgcagacgcatgacagagaagtgattgatttcagaggccaaatcgttccgatcgtctatctgaaaaaagaattcggcattacggattcaaaacaggatgccgatcagttccatgtaatcgtcgtgaaaaagggcgataaatccactgcttttgtcgtggactcttttatcggacagcaggaagtcgtactgaaatcactcggcgactatttaacaagcgtctttgcgatttccggcgctacgattctcggaaacggagaagtggcgctgattattgattgcaatgcgctgatctactaaaacgacacgaggaggtgcccgaatgactgctgaaatcaaaacaggtgaaaaaatgattgtgtttatgataaacgggaaagaatacgctatctcagtttcccaggtgaaatcaattgaaaagtggcaaaaaccgacgagggtcccgggtgtggaatcttatatccgcggtgttatcaatctgcgcggagtgattaccccggttcttgatttaagaaaacgtctgaatcagcctgaacaggacatcacagaagagactcggattatcatcatttcttaccgtgacgccgatgtcggatgggtcgtggatgaggccaatgacgtcatcaccgtgcatgaaaatgaaatcgaatccgcgcctgaaagccagacaaaggaaacggatgtgtggattaaacagatcgtcaagcaagataacaggctcctcaatattatcgatgcgcatgcggtgctggataaaggtgcttcggcatctgcgtccggagagcctaatgcttaaaggggaaaagacaacatgagtaagtttgaagcgatcaaagaagagcagatggatattttgcgggaagtcggaaatatcggggcgggtcactcggcttctgcaatggctcagctgctgaacagaaagatagacatggaagtgccgtttgcgactttattgacatttgatgagcttgctgattttttcggcggggctgaaacgccggtcgccagtatctttttaagaatggaaggcgacatgaccggctctatctttctcatcatgcctttccatcaggcggaacagtttatcagagagctgatcggaaatccggattttgatattgaccagttgggcgaagatcatttgagttcttctgctttacatgagttcggcaatattttagcaggttcctatttaacggcattggctgatttgacaaaacttgagatttacccgagcgtgccggaaatctcacttgatatgttcggcgcggttatcagtgaagggctgatggagctcagccaagtcggagagcatgccattgtcgtggatacttctatttttgaccagggcagccggcaggagctcaaagctcacatgtttatgctcccggactatgattcttttgaaaagctcttcgtctcattgggtgcggctttatgagccgtgcggaagccgcagtcgttaaagtggggattgcggatgttcaagtcgcgcgttacccggataaaatccggacctcgggactcggttcatgcgtggggctggttttatacgataaagacaaacaaacggcaggactcgttcacgtcatgctgccggactccggtttatcaaaaacggcggagctcaaccgtgcaaaatacgcggacaccgccgttaagatgacgattgatatgcttttgaaagccggctgccgcaagtttgccctgaaggcaaaactcgccgggggagcggagatgtttaagtttaaaatgacaaacgacctgatgaaaatcggtccgaggaatgtagcggccatcaaagagcagctttcattgtataacattccggtcatcagtgaagatacgggcggctcaagcggccggacgattgaatttgagccaaggtcctgcatgctgcacattcgaactgttaaacaaggtgaaacaacgatttaataaaggtatgaggtagggggataacaatgcaatccttgaattatgaagatcaggtgctttggtcgcgctggaaagagtggaaagatcctaaagccggtgatgatttaatgcgccgttacatgccgctggtcacatatcatgtcggcagaatttccgtcggactgccgaaatcggtgcataaagacgatctaatgagccttggtatgcttggtttatatgatgccctggaaaaatttgaccccggccgggatttaaaatttgatacctatgcctcgtttagaattcgcggtgcaatcatcgacgggctgcgtaaagaagattggctgcccagaacttcacgggagaagacaaaaaaagtcgaagcggcgatcgaaaaacttgaacagcgctaccttcggaatgtgacgccttcagagatcgcagaagagctggggatgacggagcaggacgtagtatcaacgatgaatgaagggttttttgccaatctcttatcaattgatgaaaagcttcacgaccaggatgacggtgagaatattcaagtgatgatcagagatgacaaaaatgtgccgccggaagaaaaaatcatgaaggacgagctgatcactcagcttgcgggcaaaattcacgagctctccgaaaaagagcagcttgtcgtcagtttattctataaagaagaactgactttgaccgaaatcggacaagtcctgaacctttcgacgtcgcggatttcacagattcattcaaaggcgctgtttaaattaaagcatctgcttgaaaaagtaattcaataatgaactcatggttagcgagtgaaaaacatgtcaacactattatggcttttaagctttgtgcttcacggcgtactgctttatgccgtcattattctgtacacgaggttttcagccctcaaggagacggagcgccagcagaagaagattcttgaagagacggaaaacacccttgcagcgtttctgcttgagctgaaagaagaaaatgaaagactcgaagacgcaaaaagccgtcaagcgccggacgcagaagacgccgaacccctggcggaaccgaaagaagagcctgatattccggaccacatggaaaagctcatcagtgcaacggaacgggctgaaagtgatgaaaacaacggcgcgcattcgtttgaagaacgtgtttcagaattatatgaacaagggctcacccccgcggaaatcgccaaacggatgcagagcggaaagacagaaatcgagctgtttttaaaatttcgcggcaaagctgtaaaggattcttgattgtcgcataaagctgtgttatattatgtcttggtgttaaatacacacgcttaacgatttatgcagagggtgctgcaaacggcagttctgcacaaaaatgacctaagcggaggaaaaaaaccattttattaggaggaaatcacatgtcagttatttctatgaaacaattgcttgaagctggtgttcacttcggccaccaaacacgccgctggaacccaaaaatgaagcgttacattttcacggagcgtaacggaatctacatcattgaccttcaaaaaacagtgaaaaaagtagaggaagcttacaacttcacgaaaaaccttgctgctgaaggcggaaaaatccttttcgtcggcacaaaaaaacaagctcaggattctgttaaagaagaagctgtacgctctggcatgtactatgtcaaccaacgctggttgggcggtacactgacaaacttcgaaacaatccaaaaacgcattaagcgtctgaaagacatcgagaaaatgcaagaaaacggtacatttgaagtacttccgaaaaaagaagttgttcaattgaaaaaagaattagagcgtcttgaaaaattcctcggcggaattaaagacatgaaggatcttcctgatgcattattcatcatcgatcctcgcaaagagcgcatcgctgttgcggaagctcgcaaattgaacattcctatcatcggaatcgtagatacaaactgtgatcctgatgaaattgatgtcgtaatccctgcaaacgatgacgcaatccgcgctgtcaaacttcttacttctaaaatggcagatgctattcttgaagcgaagcaaggcgaagaagaagcggaagctgctgaagagactgcacctgaaacagaaacgacaactgcgtaacctaatcaaaaggtgataagagggactgccttttatcaccttttttcaagaaaaatgtatctatacatatcttgtttacacatataaggaggaattcaaatggctattactgcacagcaggtaaaagaactgcgtcaaaaaacaggcgctggtatgatggactgtaaaaaagcattgactgaaactgacggagatatggacaaagcaatcgaccttctgagagaaaaaggaattgcgaaagcagctaaaaaagctgaccgtatcgctgctgaaggttctactcttattaaaactgacggcaacaaaggcgttatcttagaagtaaactctgaaactgatttcgttgcgaaaaacgaaggcttcaaagagcttctgaacacgcttgctgaccaccttcttgcaaacgctcctgctgatcttgaagaagcaatgggtcaaaagatggaaaacggttctactgttgaagaatacatcacaagtaacgttgctaaaatcggagagaaaatcactcttcgccgttttgctgttatttcaaaagaagacagcgaagcgttcggtgcttaccttcacatgggaggccgcatcggcgtattatccgttcttagcggaacaactgacgaagatcttgcaaaagacatcgcgatgcatgttgcagcggtaaatcctcgttacatttcccgcgaccaagtgtctgaagaagaagcaaaccatgagcgtcagattctgactcagcaagctcttcaagaaggcaaaccggaaaacatcgtagctaaaatggttgaaggccgtctgaacaaattcttcgaagaaatttgcttattagaccaagctttcgttaaaaacccagacgaaaaagtgaaacaagttgtggctgcgaaaaacgcatctgttaaaacttacgtccgctacgaagttggagaaggtattgaaaaacgccaagaaaactttgctgaagaagttatgaaccaagtgaaaaaataatggcggaaagccttggcgaatctttcgcggcttttcaggcagtataggggacactacttgtgttccctatttttaaaactatatttacaaacctttttttctcttgcataataggaaacggcaatgtttacacttggaggttattatggaaaaaccaaaatacaatcgtatcgttttaaagcttagcggagaagcattggcaggagagcagggaaacggcattaatccaactgtcatccaatccatcgctaaacaggtaaaagaaatcgctgagcttgacgtcgaagtggccgtagtcgtaggcggcggcaacttatggcgcggaaaaacgggcagtgacttaggaatggaccgtgcgacggccgattatatgggcatgcttgctactgtcatgaactcacttgccctgcaggacagcctggaaacgctcggaattcagtccagagtgcagacatcaattgaaatgcgtcaggtcgctgagccttacatcagaagaaaagccatccgccacctggagaaaaaacgcgttgttatttttgccgcgggaacaggaaacccttatttctctacggacacaaccgcagcgctgcgtgccgctgaaatcgaagcggacgtgatcttaatggcgaaaaataatgtcgacggtgtgtataatgctgatccgagaaaagatgagtcagccgttaaatacgaaaaattatcttatctcgatgtgttaaaagacgggctggaagtcatggattctacggcttcttcactatgtatggataatgatattccgctgatcgtcttttctattatggaagaaggaaatattaagcgtgccgtaatcggcgaatctatcggaacgatcgtaagggggaaataacgttgtcaaacgaagtattaacacaaacaaaagaacgcatggaaaaagcggttgccgcttattcacgcgaattggcgtcagtccgcgcaggacgtgccaacccatctctattggataaagtgacagtagaatactacggtgcccaaacacctttaaaccagctgtcttccatcaatgtgcctgaagcgcgtatgcttgttgtcacaccgtatgacaaaacggcaatcggcgatattgaaaaagcgattctgaaagctgatcttggcgtaacgccgacaagtgacggcacaattatccgcatcgcgatcccggctctgacggaagaaagacgtaaagaacttgtcaaagtcgtgaaaaaatacgcggaagaagcgaaagtagcagtccgtaatgtccgccgtgacagcaacgatgacctcaaaaaacttgagaaaaacggagacattacagaagacgagcttcgtgcttccagtgaagacgttcaaaagctgacagatgaatatgtgtcaaaaattgacagcgtcacgaaggacaaagaaaaagaaatcatggaagtttaatgaaaaactatgtacaatagataatgtgaaaagaccctctcatgtttacagggggtttttttgttaatactgttgattacattgatcatcagcaacgcaacctttttgggtgacggaggaatctcatgctcaacatactcaaaaattggaagaatcagcagaatgcggcttccaacttagaacggtatacaaaagaagacatactgaagggtgaaattcccgcacacattgccattattatggacggaaacggacgctgggcgaagaagcgctcactccctcggattgcaggacatcatgaaggaatgaaagtggtaaaaagggtgacaaagctcgcaagtcagctcggcgttaaagttctgactctttatgcgttttcaacggagaactggaagcgcccgaagatggaagtcgactttttgatgaagcttccggaagagttcctgaatacgtatcttcctgaattaatagaggaaaatgtacaggtgaaaattatcggagatgaatccgcgctcccttctcatacgtacagggcgattgagaaggccgtaaaagatacagaacaaaatgacgggctgattctcaatttcgctttgaactacggcggacgcacggaaatcgtcaatgcggcaaaagcactggccgaacaggtgaaaagcggcacgctgaatatcgaagacattgatgaagcgctcttttccgggcatttaatgacagaatcaatccaggacccggagctgctcatcagaacgagcggagaaatcagattgagcaactttatgctttggcaggtggcttacagtgaatttgtttttacagatgtcctgtggcccgattttaaagaagatcactttctgcaggcagtgggagaatttcaacagcggggccggaggtttggcggaatttagaggatggtggaaatgaaacaaagattgttaacgggtgttctggcagcggcactatttttatttttggttattttcggaggattgccgttcaccgtatttgtttacgtgatgggaagtatagcgctttttgagcttttgcggatgaaaaagctcagatttttttcttttccgggtctgatcagcctcttgttgttatggctgtatatgatgccggacaagtatcattttttcgatgcgaaaatggaagtaacgattttcgccgtattgattctgctcagctatacggtgctcgtgaaaaacacttttacgtttgacgaagtcgggtttatcgttctcgcgacggtatatatcggactgtgttttcattattttattgaaatcagaaacattgaaacaaacgggcttttgtatatcttttatgcctgcgttgtcatatggtcaacggactcaggcgcatatttcgtcggaaagtcgctcgggaagcggaagctgtggcccgaaatcagtcccaacaaaacggtggaagggtttctcggcggtattgtcatcgcccttatttttacggctgtttttcagctgtttgcgcaccttccgatttcatacccggttcttttggtcatcacgcttgttctgtctgtattcggacagatcggggatttggttgaatcagcgcttaagcggcactatgatgtgaaggattcgggaaaaatccttcccgggcacgggggcattttagatcgatttgacagctttttgtttgtcatgccgttcttatactttctgcttgcgcttttttcatgagaaaggctaatatgaaaataagaccgatctggacgcatagaatgggagtggcattttgaagaatatttgtcttttaggagcaacaggatcaataggggagcagacgttagacgtattgcgcatgcatcaagatcagttccgtctcgtctcgatgactttcggtaaaaacgccgagaaagcgatcccgttgatcagaacgtttcagccgaaatatgtagcagtcggcgacatggatacataccaaaaagtgaaagaagcgtctttttctcatgaatgtcaaatcggcatcggagaagaaggcctgattgaagcggcagtcatggacgaagtggatatcgtggtcaatgcgctgcttggaagcgtcggtttaatcccgactttgaaagcgattgaacagaaaaaaacaattgcgcttgcaaataaggaaactctcgtcactgccgggcatatagtgaaaggacacgcaaaacgatacggtgttcctcttcttccggtcgacagcgaacattccgctatttttcaggcgctgcaaggcgaacagagcaaaaatatcgagcgcctggtcattacggcatccggcggcagtttcagagataaaacacggcaggagcttgagtctgtaacgattgccgacgcccttaaccacccgaactggtcgatgggtgcaaaaattacgattgactcggctacaatgatgaataaaggacttgaagtcattgaggcgcattggctgtttgacattccgtatgaacagattgacgttgtattacataaggagagcatcattcattcgatggttgaatttcacgacagaagcgtcatcgcccagctcggaaatccggacatgagggtgccgattcaatatgcgctgacatatccggaccgtctgcctctgcctgaaactaaaaggcttgaattatgggagatcggaaacctccattttgcgaaagctgactttgaaaggttccgctgcttacaatttgcctttgaatcaggtaaaataggaggaacgatgccgacggttttaaatgcggccaacgaagaagccgttgccgcttttcttgccggacggatttcattcttatcgattgaggacctgattgaacaagcattggaccgccacagcgtaattcaggatccgagtcttgcggatatccaagaagtggacaaagacacccggggatacgttaattcaatactcacataaggtggtatgttcgtgaatacagttatcgcgtttattattattttcggaacgctcgtttttttccatgagctcgggcatttattgctcgcccaaagagcgggaatcctttgccgtgaatttgcgatcggcttcggccctaaaatcttttcatttaaaaagaatgaaaccgtgtatacgatcagactccttccggtcggcgggttcgtccgcatggccggtgaagacccggagatgatcgaagtcaaacccggttataccgtcgggcttctttttaataaagatgacgaagtggaaaaagtcatcattaatcaaaaagaaaaatatcccgacgctttaatgatcgaggtggagacggctgatcttgagcacgaaatgaagattaccgggtacgagcaggggaaagaagatgaactggcgggctttactgtcagtcagacctccttttttatcgtagacggagaagaagtgcagattgcgccttacaatcgacaattcgggtctaaacccgtatggaagcggattaaggcgattgctgccggtccgataatgaacttcatcttagcgtatgtcattctcgtcatgcttggattcattcaaggcgtgccttcgaatcagcctgagctcgggaagctgacagacaatggacgcgcagcggctgccggtttaaaagaaggcgactatatccagagcattaacggtgaaaaaatgaggtcatggacagacatcgtgacagcggtaaaagaaaatcccggaaaaaaaatcgatgtcgccgtcaaacgggacggcaaatcgtttcatatctcggttacacctgaagctgtaaaagatgaaaataaaaaaacaatcggccgcttcggctcttatgcgccgactgaaaaaggcgcgcttgcagcgatcgcctatggcgcgacatctaccgttgatgtcacaaaagcgattctgaccaatctgagcaaacttgtgacaggccagtttaagcttgatatgctttcgggtcctgtcggcatttatgatatgacggatcaagttgcaaaaaccggtattatcaacctattccagtttgcggcgtttttaagcatcaacctgggaattgtcaacctgctgccgataccggcgcttgacggcgggcggctgctgtttttattcattgaagcaatccgcggcaagccgataaaccgtgacaaggaagcatttgtcgtatttatcggcgtagctttcttaatgcttcttatgctggttgtcacatggaacgatatccagcgtttattcttataattgactagtaaaaaatcagaggtgcgaagacatgagacaaagtttgacgcttattccgaccctgagagaagtgccggctgatgctgaagcaaaaagccataagcttctgctgagagcgggatttatcagacaaaatacgagcggggtttacagctacatgcccctggcttacagggtcattcaaaacattcagaagatcgtgcgtgaagaaatggaaaaaatcaacgcggtggaaatgctgatgccggcccttcagcaggctgaaacatggcaggaatcgggcaggtggtatacgtacggccctgaattaatgcgtctgaaagaccgccacggccgtgaatttgctttaggcgcgacacatgaagaagtcattacttctctcgtgcgcgatgaggtgaaatcttataagcgtctgccgctcactctttaccagatccagtctaaattcagagatgaaaaacgcccgcgtttcggcttattgcgcggacgcgaattcatcatgaaagatgcgtattctttccatgcttctgaagaaagtctggaggaaacataccaaaacatgtacggcgcatacagcagcattttcgcacgctgtgaattaaacgtccgtcccgttattgccgactcgggcgcgatgggcggaaaagacacgcatgaatttatggctctttctgaaataggggaagataccatcgcttattccgatggatcctcttacgcagccaatacggaaatggcggaagttgtcatgaacagcgagccgtcagatgaaacacccgaggcattggagaaaattgatacgccgaatgtcaaaagcattgaagagctcgcttcgttcttgcagatcgagccgagcgcctgcatcaaatcaatgctgtttaaagcggatgaccgatttgttctcgtgttagtaagaggcgatcatgaggtcaatgacgtgaaagtgaaaaaccttctgaacgcggaagtggttgagcttgcgtctcatgaagaagtagccgagaaacttggcacggagccgggatttgcggggccgatcggcgctgccggcgacattgagatttatgccgaccaagccgtgaaagtaatggtaaacgccgtttgcggcgcgaatgaaaaagaccgtcattaccgaaacgtaaacatcgaacgtgacgcgtctgtaaaagcatacgccgatcttcgaatcattcaggaaggcgatccgtcacctgacggaaaaggcacgatccgtttcgctgaagggattgaggtcggacaagtctttaaactaggcacgcgttactctgaagcgatgaatgcgacataccttgatgaaaacgggcgtgcgcagccgatgctgatgggatgttacggaatcggcgtgtccagaacgctttcagccatcgctgaacagcatcacgacgaaaaaggcttgatctggccgaaaagcgttgctccgtatgaccttcatattttggcgctgaatatgaaaaacgaagcgcaaaaagagcttgctgaacagctttacggcaaattccaggcggaaggttatgaggtattatacgatgaccgcgctgaacgcgcaggcgtgaaatttgctgattctgatctgatcggccttccgatccgcatcactgtcggaaaacgtgccgacgaaggcatcgtagaagtgaaaatccgcaaaaccggtgaatctgccgaagtttcagtggatgagctttctgaatttatcaagacgaagtaatcaccataacgaatcatacaaaatcatgttaaaatagagaaaaaagaaggtacctcatcacctgcggaggtaccttcacttatgatgttttaagggagggatactgtctgaatggaacagttatcagtaaacagaagacagtttcagattcttctgcagcagcttaatatgacagatgataccttcatgacatactttgaagacggagagattgataaactgacaatccataaagcagaaaaggcctggcatttccaatttcgctttaaggctcttttgccgtatcaaatatatgattcattcatgatgaggttaacacaatcgtttgctcacatcgcccgtgtcacatcgtccgttcaggtcatcgaccctacagtgacagaggagcttgtacaggattattggacacgctgtattgaagagcttgaaggaacctcgccgccgatggtggctcttttgaatcagcagaagccgaagctcaagggaaacaaactgatcgtgaaaacaaaaacagatacagaagcatctgcgctcaaaaataaatacagcgcactgattcagcacagctaccgccaattcggctttccggaactgcagctggataccgaaattttcgtatctgaccaagaagtccagaaattccgcgagcaaaagcttgctgaagatcaggagcgggcgatgcaggcgcttatcgagatggagaagaaggaaaaagagggcgatgaggatcaggcaccgtccggaccgcttgtcatcggctatcaaattaaagagaacgaagaaatccggacgcttgacagcatcatggatgaagaaagaagaattacggtgcaggggtttgtgtttgatgctgaaacacgcgagctgaaaagcggacgcacgctctgtattttcaaaatcacggactatacaaacagcattttagtaaaaatgttcgccagagaaaaagaagacgccgctttgatgaaaacgctgaaaaaaggcatgtgggtgaaggcgcggggaagcattcaaaacgatacattcgttagagacctcgtcatgattgcaaatgacgtgaatgaaataaaagccaaaacccgtgaagacaccgctcctgaaggcgaaaaacgggttgagcttcatctgcattctccgatgagccaaatggatgctgtaacgggcatcggaaagcttgtcgaacaggcgaaaaaatggggacatgaagcgattgcgttaactgatcatgccgttgtgcagtctttcccggatgcctattccgccgcgaaaaaacacggcattaaaatgatttacggaatggaagccaatatcgtagatgacggcgttccgatcgcatacaatccagctcaccgtcttctggaagaagacacatacgttgtctttgacgttgaaacgacaggtctgtccgcagtgtatgacaccatcattgagcttgctgcagtcaaaataagaggcggagaaattatcgataaattcgaagcgtttgccaatccgcaccatccgctgtcagcaacgacgatagagcttaccgggattacggacgacatggtccgcgacgctcccgatgtcgttgacgtcgtccgggattttaaagaatggatcggcgatgacgtgcttgtggctcataacgccagctttgatatgggatttttaaatgtggcgtacaagcgtcttttgaaaacggaaaaagcgaaaaatccggtcattgatacgctggaactcgcgcgtttcctgtatcctgagtttaaaaatcaccgcttaaatacgttatgtaagaagtttgatatcgaattaacccagcatcaccgagcggtttttgacgctgaagcaacgggctacctgctgttgaaaatgctcaaagatgccgctgaaaaagacattttttatcatgatcagctgaatgagaatatgggacaatccaatgcttatcagagatcaagaccttatcacgctacattgcttgccgtaaatgagaccggccttaaaaatctgtttaagctcgtgtccatttctcatattcaatatttctacagagtgccgcgcattccgaggtcgcagcttaataaatacagagaaggtctgttaatcggctctgcctgtgacaggggtgaggtctttgaaggcatgatgcaaaaatctcctgaagaggttgaagatatcgcatccttctatgattatcttgaagtgcagccgccggaagtatacagacaccttctgcagcttgagctcgtccgggatgaaaaagcgctgaaagaaatcatcgccaacattacgaagctcggagaaaaattgaataagccggtcgtggctacgggaaatgtccactatttaaacgatgaggataaaatttaccggaagatcttaatatcttcccaaggcggcgccaacccgttaaacagacacgaactgcctaaagtgcacttcagaacgacagatgaaatgctggaggctttctccttcctcggtgcggaaaaagcgaaagaaatcgtggttgacaatacgcagaaagtcgcttcgatgatcgatgagatcaaaccgatcaaagacgatctgtacacgccgaaaattgacggggccgatgaagaaatccgtgaaatgagctatcagcgcgccagaagcatttacggtgaagagcttcccgaaattgtggaagcgagaatagaaaaagaattaaaaagtatcatcggtcatggattcgccgttatttatctcatctctcataagcttgtaaaacggtctctggatgacggttatctcgtcggctcccgggggtccgtcggttcatcgcttgtggcgaccttaacggaaatcactgaagtgaacccgctcgctccgcactacgtgtgcccgagctgccgatattccgaattctttaatgacggatcagtcggttccggttttgaccttccggataaaagctgcccgtcttgcggcacccctttgaaaaaggacggacatgatatcccgtttgaaacgttcttaggctttaaaggtgacaaagtacccgatatcgacttgaacttctcaggtgagtaccagccccatgcccataactacacgaaagtattgttcggtgaagataacgtgtatcgcgctggaacgatcggcaccgtcgcggaaaagacggcttacggatatgtgaaaggctatgcgggcgaccacaacctacacatgcgcggcgcggagatcgaccgtctggtgcagggctgcaccggcgttaagagaacgaccggccagcacccgggggggattatcgttgtcccggattacatggatatttacgatttttcaccgatacaattcccggcagatgcgacggggtctgaatggaaaacgactcattttgacttccactccattcatgacaacctgctgaagcttgatatattggggcacgatgatccgaccgtcatccggatgctccaggatttaagtggaattgatccgaagacgattccgacagatgatccggaagttatgaagattttccaaggcacagaatcgctcggcgttactgaagagcagatcggctgtaaaacggggacgctcggcattcctgaattcgggacgcgatttgtgcggcagatgcttgaggatacgaagccgacgacgttctccgagcttgtccagatttccgggctttctcacggaacggacgtatggctcggcaatgcgcaggaactgatacacaacaatacgtgtgaactgagcgaagtgatcggctgccgtgatgacattatggtttacttgatctatcagggccttgagccttcactggcctttaaaatcatggaattcgtccgtaaaggcaaaggcctgacgccggaatgggaagaagaaatgaaaaagaacaatgtgccgaactggtatattgattcatgcaaaaaaatcaaatacatgttcccgaaagcccacgccgccgcatacgtgctgatggcggtgcggattgcatactttaaagtgcatcacgcgcttttatattatgctgcgtattttaccgtccgcgcagatgactttgacattgatacaatgattaaaggctcgactgccatcagagcggtgatggatgatatcagctctaaagggcttgatgcttcgccgaaggagaaaaacctccttaccgtgttagagcttgcgcttgaaatgtgtgagcgcggctattccttccagaaggtcgatctataccgttcgagcgcttcggaatttatcattgacggcaacagtctcatcccgccgttcaactcaattccgggactcggaaccaacgccgctctcaatattgtgaaagcgcggaaggaaggggagttcctttcaaaagaggatcttcaaaaacgcggaaaagtgtcaaaaaccattttagagtatttagaccgtcacggctgtcttgagtcgcttccggaccaaaatcagctgtctctgttttaagctttgtgcacagcctccgagcggagtttgatttgcattaaatatatggttatggtatagttttattggaaatgctaacgattaccgaggcaaagagtggggaaacccgctcttttgtattgaacaggcaattttgcctcgacatgtccatcgttttctcaatgcccctgctcttttgaagcagggtttttatgcagaggaacggctgatatgatatcgacagcacaaggaggaaaaacatgagcaaaaaagtgactgataccgttcaagaaatggctcagcccatactggatgaccttcagcttgaactcgtagacattgaatttgtcaaagagggtcaaaactggttccttcgcgtgtttattgattccgagaacggtgttgatattgaggagtgcgccaaagtcagcgaagcgttaagcgaaaagctggatgaggccgatccgatcacccagaactactttcttgaagtatcttctcctggagccgagcgtccattaaagaaaaaagccgacttcgaaaaatcactgggcaaaaatgtgtacatgaaaacgtacgaaccgattgacggtttaaaagtgtttgaaggcaaattggctgaattcgatggacaaactgttacaatagagatgacggtcaaaacaagaaagaaacgggtcaatattccgtatgaaaaaatagctaacgcaagattagctgtaacattttaatgaatgaagtattagtgtttaaggggggagaccgctaacatgagcagtgaactattagatgctctcactattcttgaaaaagaaaaaggcatcagtaaagacattatcatcgaagcaattgaagctgccttaatttccgcgtataagcgaaattttaaccaggcgcaaaacgtacgggtcgatctgaaccgtgagacgggcacgatccgcgtgttcgcaagaaaggatgtcgtagacgaggtatacgattcaagacttgaaatctcgcttgacgacgctcagcacatccatccgaactaccttgtcggagatgtcgttgaaatagaagtaacgccgaaagacttcggccgcattgctgcgcagacggcgaaacaagtggtgacgcagcgtgtccgtgaagctgagcgcggcgtgatttactcagaatttatcgatcgtgaagaagacattatgacgggaattgtacagcgcttagacagcaagtttatttacgtgtctctcggcaagattgaagcgctgctgcccgtcaatgaacaaatgccgaatgagagctataaaccgcacgatcggattaaagtatttatcacaaaagtcgaaaaaacgacaaaagggcctcagatctatgtatcaagaacgcatcctggtctgttgaagcgtctttttgaaatcgaagtgccggaaatttatgacggaacggtcgaactgaaatccgttgccagagaagcgggcgaccgctctaaaatctccgtccgcactgatgatcctgacgttgatccggtcggttcatgcgtcggtcctaaaggccagcgcgtgcaggcgatcgtcaatgaactgaaaggcgaaaaaattgatatcgtcaactggtctgatgatccggttgaatttgttgccaatgcgctcagcccgtctaaagtgctggatgtcatcgtcagcgaagaagaaaaagccacgactgtcatcgttcctgattaccagctttctctggcaatcggaaaaagagggcaaaacgcccgcttagctgcgaaactgacaggctggaaaatcgatatcaaaagtgaaacggatgcaagagaccttggcatctatccgagagagcatgaagaagatgacgatttagagccgctctttatggagcctgaaacagccgaatcggatgaataagaggtgactttaggtgaataagcgaaaaaaaattcctctgcgcaaatgcgtggtaacgggggaaatgaagcctaaaaaggaactgatccgaattgtccgttctaaagaaggagagatttcagtcgatccgaccggaaagaagaacgggcggggtgcctatatcacccttgagaaagaatgcatcttagctgcgaaaaagaaaaacacattgcaaaatcaatttcaatcacaaatcgatgaccagattttcgaagaattgctggaactggcggaaaaggtgaaaaaataacatgtctggaatggaatggtttcccttgctgggtctggccaatcgagctcgtaaggtcgtgtcgggcgaggacttggttataaaagaaattagaaatgcgcgtgcaaaacttgttctgctgacagaagatgcatctgcgaatactgcaaaaaaagtatccgataaatgcaattattataaagtgccttataaaaaagtcgaaagccgcgctgatctcggccgctctatcggcaaggaatcacgtgtcgttgtcgccgtcactgaccaaggttttgcgaataagctgatcagcttgctcgattaatatttttgggggtgaacgaatggctaaaatgagagtttacgaatatgcaaaagccatcaatgtttcaagcaaggaaattttgactgcgctgaaaaacatggatatagtagtaaataaccatatggcaatgcttgaagaaaagaccattaagcagcttgatgcgaaatttaaaaaaggcggcgccggcgttacatctcagaagcctgcggaaacgaacaaaaacaagccgcaagggattaatcagcagcctgctgggaatcaaccaaacaaaattcgagacggaaagaagaatgacgtgcagaataatcaatttaacaaaaacaagaagaataacaacaacaaaaacaaaaacaaacgcaatcataacaacaaaaatcagtatcagcaaaaaccgctgaagccgaaaaaagagcttcctgagaaaattacgttttccggctctttaacagtcggagctttagccgaggaactgggcaaagagccgtctgaactcattaaaaaactgatgcttctgggcgtaatggctaccattaaccaggagcttgacaaagacacaatcgaactgatcgcatctgaatacggtgtagaaacagaagaagtgattgtgcttgaagaaactgagcttgaaaaatatgaagaggctgacaaagaagaagatcttcaaatccgtccgcctgtcgtgacgatcatgggccacgttgaccacgggaaaacgaccctccttgacagcatcagaaaaacaaaagttgttgaaggtgaagccggcggaatcacccagcatatcggggcttaccagatcgaagaaaacggcaaaaaaatcacgttcttagatactccgggacacgcggcgttcacaacaatgcgtgcgcgcggtgcggaagtaactgatattaccattttagtcgtagcggctgatgacggcgttatgccgcagacagtcgaagccatcaaccatgcgaaagcggctgaggttccgattatcgttgccgtgaataaagtggataaagaaagcgcgaaccctgaccgtgtcatgcaggagctgactgaatacggactcgttcctgaagcatggggaggagaaacgattttcgttcctctgtccgctcttacaggcaagggaattgacgagcttgtcgaaatgattctgcttgtcagtgaagtggaagagctgaaagccaatccgaaccgtcaggcaaaaggaacggttattgaagctgagctcgataaaggaagaggatctgtcgcgacacttctcgttcaaacgggaacattgaatgtcggagatccgatcgttgtcggaaatacattcggccgcgtgcgggccatggtcaatgatctcggccgccgcgtgaaaacagccggaccgtccacacctgtagaaattactggcttaaacgacgtaccgcaggctggcgatcaattcctcgtctttaaagacgaaaaaacagcccgttctgtcggtgaagcacgcgcttccaagcaactggaagaacagcgcagcgacaaagcgaagctgagcctcgatgatctgtttgaacaaattaaacaaggcgatgtcaaagacatcaatttaatcgtaaaagctgacgttcaaggttcagccgaagcgttaacagccgctcttcaaaaaattgaagtagaaggcgtaaaagtgaaaatcattcacacaggcgtcggtgcgattacggaatcagacatcattctcgcatctgcttcaaatgcaatcgttatcgggtttaatgtgcgcccagacggaaatgctaagagcacggctgaagctgaaaatgtagatatccgtcttcaccgtatcatttacaaagtcatcgaagaaattgaagcggcgatgaaaggaatgcttgatcctgaatacgaagaaaaagtcatcggccaggttgaagtgcgccaaacattcaaagtgtcgaaaatcggtacgattgccggcggatatgtaacagacggccacattacacgtgacagcggactccgcctgatccgtgacggcgtggtcatcttcgaaggggaagtagacgttctgaaacgcttcaaagatgatgtgaaagaagtttcacaaggatatgaatgtggtattacaattaagaaatacaatgacattcgcgaaggcgacatcattgaagcgtatgtcatgcaggaaatcgaaagaaagtgatcggatttgcggaatgtgaatgcatcatttatgatgcgggatcattaaaggagaaacgagccgttctgaagcggattataacgagggttcagaataagttcaacgtgtcggccgcagaaatcggctatcaggacacttggcagcggaccagcttcggaatcgccgtcgtctcctcctctcacgttcaggcggaaaaggagatccagcgtgtactcgcgtttattgactcctttcccgaaatagaacggacgatcactagaacagagtggttttaacttagaggtgattgaattgagtatgagagcaaaccgtgtcggcgagcagatgaaaaaagagctcggggatattatcagccgaaagctgaaagacccgagaatcggatttctcactgtaacagacgtacgtgtttcaggtgatttacaaatagcgaaggtgtatatctccgttctcggcggagagaaaaagaaagaggaggcgctgaaagggcttgagaaagcgaaaggatttatccgttccgaaatcggcagccgaatcagactccgcaaaacgcctgagcttgaatttgaatttgatgaatcaattgagtacggcaaccgtattgaaacattgattcacgaactgcattcagataaaccgtctgaataacaaggaaagaggatgggcgagtgtcgtctgtcctcttttctgcgttttacgggatacaattgataacaaaggagcgaaagacagatggttaacggagttctccttttacataaaccggtcggcatgacttctcacgactgtgtaatgaaaataagaaaactgttaaaaacaaagaaagtcggacatacgggaacgcttgatccggaagtgtcaggcgtactgccgatctgtgtcggacgggccacaaagattgttgagtacgtcaccgacaagtcaaaaacgtacgatgctgagatcactctcggcttctccacatcgaccgaagaccagactggagaaacggtcagcgtaaaacctgtcaaggagccgctgaaagaagcggatatcaaagccgttttagacgaactgaagggaccgcaggagcaagtgccgccgatgtattccgctgtaaaggtcaacgggaaaaagctctatgaatacgccagggcgggtattgaagtggagcggccgaagcggaatatcacgattgaagatatcgcgctcacttcccctgtcacttataaagaagacacagcatcattccgctttacagtcacgtgctcaaagggcacttacgtgagaacattggcggtgacaatcggtgaaaaactcggctatcccgcgcatatgtcgcatctcatccgcaccgcttccggcgatttcagccttgatgagtgtttcacgtttgaggaacttgaacagcaggtttcagacggcacggttgcagagcatgccgtgccgattgaaagagcgctcaatcatttgccgaaatgggtcataagtgatacattagctaagaaagctgaaaacgggtcagtgtttgacatcccggcggaattttctgcaatgacagctgacgcccgtatagcggtctgtactgaagacggagaatgtgtggccatttatatgccgcatccttcaaaaaaaggactgctgaaaccggctaaagtgctcatgcaaaaaagcgaacaataagaaaaaaggtgaccgttctgtgaagacgatacatatttctcatccgcatcatttacaaaaagaagagcagccggcgtctgtcatggcgctcggctactttgacggcgttcatttgggacaccggaaagtaatcggaacagccagacaaattgccgaagaaaaaggcctgtcgctggccgttatgacgtttcatccccacccttcccatgtgttgggcagggacaaagagccaaaggatctgattacgccgcttgaagataaaatcagccagatcgggcgtttaggcgctgatgtgctgtatgtcgtaaagtttgatgaagcgtttgcgtctctttctccaaaacagtttgccgaggagtatattttagggttaaacgcgcggcacgctgtgggaggcttcgattttacgtacggaaaatacggaaaaggcacgatggagacgctgccggacgatttaaacggcaaggccggatgcacgactgtcgagaaacagaccgagcaggacagaaagatcagctccacttatatccggtcagcgctgcaggatggtgacgttgaacttgcgcacactcttctcggccagccgtattttatccggggcactgtgattcacggagacaaaagaggccgcaccatcggttttccgaccgcgaatgtcggcctgcacaacagctatatcgtgcctccgacaggcgtgtatgcagtgaaagccgaaataaaaggcgaggtgtatgaaggcgtctgcaacatcggctacaaaccgaccttttatgaaaagcgccccgatcagccgtcaattgaagtccatttgtttaattttcagcaggatgtatacggagaagacgttaaaatcgagtggtacaaacgaatccgaagcgaacggaagtttaacggcatcgatgaactgacggctcagatcgggaaagacaaacaagaagcgatccgttttttcagcaaataacggaaaaaacatcaaaagtacacaaattttcttctaaaagatttgcatatgggcgcgatttttagtatcatatgtttcgtagtcttaaaaccattgcttggcaatccgaagtcaccgacggttgctaggtaactggggctaattatgatatggaggtgaaacaggatggcaattactcaagagcgtaaaaatcaactcatcagtgagttcaaaacacacgaatctgatactggatctccagaagttcagatcgctatcctaacagactcaattaacaacttgaacgagcatttgcgtactcacaagaaagatcaccactcacgtcgcggtcttcttaaaatggtaggtaaacgtcgtaatcttcttacgtatctgcgtaataaagacgtaactcgttaccgtgagttaattaacaaactaggcttacgtcgataatcgtaaaaagcgggaggattcccgcttttttatcgtattaaagcgaaaaaaataataataaaaaaacaatgaaatccttttacatactactttgacattgatatgttcaattcatttcgttcataataggagtaattgattatttcacacattaagagaggagctcgtaatcgaatgggacaagagaaacatgtctttaccatagattgggccggcagacagcttacagtagaagccggccagcttgccaaacaggcaaacggcgctgtcatggtccgctacggcgatactgcagtgctcagcacagcaaccgcatcaaaagaaccgaaaccgctagattttttcccgcttactgttaactatgaagaaagattatacgcagtaggtaaaattccgggcggttttattaaaagagaaggccgtccaagtgaaaaggccgttttagccagccgtctgatcgaccgtccgatccgcccgcttttcgcagacggattccgtaacgaagtacaggtcatcagcattgtcatgagtgttgatcaggactgctcatctgaaatggctgcaatgttcggttcatcactcgctctttgcgtttccgatatcccgtttgaaggcccgatcgcgggtgtgacggtaggccgcattgacgggaaattcgtcatcaatccgacggttgaccagcttgaaaaaagtgatatcaacctcatcgttgcaggcacaaaagacgccatcaacatggtggaagccggagcggatgaagtacctgaagaaatcatgcttgaggcgattatgttcggtcacgaagaaattaagcgcctgatcgcattccaagaagaaatcgtcgcagcagtcggcaaagagaaaacagaaatccaactgtatgaaattgacgaagagctcagcgaaaaagtaaaaagccttgcggagccggatcttctcagcgccattcaggttcacgaaaaacatgctcgcgaagacgcgattaatgaagtgaaaaatgcagttgtcgcgaaattcgaagaagaagagcatgatgaagatacgattaaaaaagtgaaacagacactgtctaaacttgtgaaaaacgaagtgcgccgtttgatcacagaagaaaaagtccgtccggacggccgcggcgttgatcagatccgcccgctttcttcagaagtcggccttctgccgagaacgcacggctccgggctgtttacgagaggacagacgcaggcgctcagcgtatgtacattaggcgcccttggggacgttcagattcttgacggtttaggcgtggaagaatcaaaacgctttatgcatcattataacttcccgcagttcagcgtaggggagacaggcccgatgcgcggaccgggacgccgtgagatcggtcacggtgctcttggagagcgtgcgcttgagccggtcattccgaatgaaaaagacttcccgtatacggtccgcctcgtatccgaagtgcttgaatcaaacggttccacttcacaggccagcatttgcgcgagcacgcttgccatgatggacgcaggtgttccgattaaagcccctgttgcgggtatcgcgatgggacttgtgaaatcaggcgagtactatacggtattaacggatattcaagggatggaagacgccctcggtgacatggactttaaagtagccggcacggaaaaaggcgtgacagcgctgcaaatggacattaaaattgaaggcctttcaagagaaattcttgaagaagcgcttcagcaggcgaaaaaaggaagaatggaaatcttgaacagcatgctcagcacgcttggtgaatcaagaaaagaactttctcaatatgcgccgaaaattttaacgatgaacattaatccggataaaatccgtgatgttatcggaccgagtggtaaacaaatcaacaaaatcattgaagataccggtgttaaaattgacattgaacaagacggcaccatctttatttcttctactgatgaaagcagcaaccaaaaagcgaaaaaaatcatcgaagatcttgtcagagaagtcgaagtcggccagctttacctcggtaaagtcaaacggattgagaaattcggcgctttcgttgaaatcttcagcggaaaagacggtctcgttcacatctctgaactagcgctcgaacgggtcggcaaggttgaggatgttgtgaaaatcggtgacgaaatccttgtgaaggtaactgaaattgacaaacagggacgagtgaatctgtcgcgtaaagcagtgctgcgcgaagagaaagaaaaagaacaggaacaacaacaatcttaaatgaaaacctaacaaggagcctgggagacccggcttctttattttgagaaagacaacagacgggttctaccttgtcctcctcatacataatgtgtgaggaggggggaaggacatgttgaaaaaattcgtgccgtttgccgtttttttatttcttttttttgtttcgtttgaaatgttaaaaaatccgtatacagttgattacatagacgcaatgaaaaaagacgctgtaactgtgtcagcatcaaaagatccgctctatgaagaattactgcaaaaagcgtcagagtatgaagtgaagccgcaagacgcgcggattgataaaatatggaagagtataccgggatataacggtttaaaagtcaatgtggaaaaatcctataaacaaatgaaaaaggacggagaatttcacgaagacggccttgtctatgagcaggtaaaaccgaaagtccatcttgattctctcgcgcccgaacccatttataaaggaaatcccgacaaaccgatggtcgctttcctgataaatgtcgcctggggaaatgaatacgtggagcaaatgctgcctattctgaagcagcaccaggtcaaagcaactttctttcttgaagggaaatggctgaaaaacaatcaggagctggggaaaaaaatagcggcagacggacatgaaatcggaaatcattcatacaatcaccctgatatgagcaaactgacttcaggaagcatttccgaacagcttgacaaaaccaatgcacaaatcagcgagacgctcggcataaagccgaaatggtttgcgccgccaagcggcagcttcagaaaagctgtggtcgatcttgcggcggaaaaaggaatgggcaccatcatgtggaccgtggacaccattgattggcaaaaaccgtctccggctgttttacaaacaagggtgttgagcaaaatacataacggagccatgattttaatgcatccgactgatccgactgcgaaaagcctggatacactgattgcaaaaatcaaagaaaaaggctacgcgctcggctcagtgtctgacttaatggatgaaaacaggctgatgaagtagcaggcggcagttgcctgtctttgaataggaggaacagacttgataaaacgctatacatgccaaaacggtgtaagagttgtgcttgaaaataatccaacggtgcggtctgtggcaatcggcgtatggatcgggacgggatcacgtcatgaaacgccggatacaaacggtatttcgcactttcttgagcatatgttttttaaaggaacaaataccaggtccgcacgtgaaatcgcagaatccttcgatcggataggcggccaagtgaatgccttcacttcaaaagaatatacgtgctattacgccaaagtgctggatgagcatgcaaactacgcacttgatgtgctggctgatatgttctttcattctgcttttgacgaagatgagctcaaaaaagaaaagaacgtcgtatatgaagaaatcaaaatgtatgaagacgcgccggatgacattgtccacgatctgctgagcaaagcgacatacggcaatcattcgctcggctacccgattctcgggacggaggaaacgctttcgtcatttaacggcgattctctcagacagcatatggatgacttttacacgccggaccgcgtcgtcatttctgtcgccggaaatgtaacggaacaattcattaaagacgtggagaaatggttcggtacatacgaagcgaagggcaaagcaagcggcatcagcgagcctgagtttcattatgaaaagctgaccagaaaaaaagacaccgaacaagcgcatctctgtctcggtttcaaaggcctgaaagtcggagatccggacatttacgatttgatcgtcttaaacaacgtgctgggcggaagcatgagcagccgtcttttccaggatgtgcgcgaagataaaggactggcctattctgtatacagttatcacagttcctatgaagacagcggtatgctgacgatttacggaggcaccggcgcgaatcagctcggacttctgtctgaaactattcaggaaacgttatcggttctaaaacgtgacggtatcaccccgaaagagctggaaaacagcaaagagcaaatgaaggggagcttaatgctcagcttagagagcacaaacagcaaaatgagccggaacgggaaaaacgaactcctgctcggaaagcataagaccatggatgaaattatcactgaattaaatgcggtcagcctggaaagcgtcaacggcctcagccgccgcttatttacggatgattacgcactatcgctcatcagcccgaccggcaatatgccggcctcgtcttaatcggaaaagcagtctgcctctatacggggcaggcatttttttttgctccgggtcatatagtacaagggggtggctatcatgaggctcagtgaactttcaggtaaagaaattgtggacattaaacgggcagagcggctcggcgtgctcggccagaccgatttggaaattaatgaacaggacggacaaattaccgcgctgttgataccgacggtaaaatggttcggattgcgaaaacaaggccacgacatccgcgtcccctggaaccatatccaaaaaatcgggtcagacatgatcattttagacgttccgggggagatcacgcctcccgaagagtagatcttattcattttttgcaagcaccggctcatacagccggtgcttttttcatgaaaaagaacgctgtacattcaccgccctttctctttgcacatacgatgaagaggaggatgacacttaaaagatccagtaactgtaaagaaggtgaacgtttcagatgttaaccggattgacaattgcgatcattggcggtgacgcaagacagcttgagattataagaaagctgacagaacagcatgccgatatttatcttgcagggtttgaccaattggatgacggttttacaggaaccgtcaaatgcaaaattgatgagattccctttcaaaaaatagacagtatcatcctgcccgtatcggcaacgaccggagaaggcgttgtttccacggttttttcaaatgaagaagtggtattaaagcagagctatcttgagcggacaccggagcattgcgtcatttattcaggcatctccaacgcgtatcttgaggggatcgccagcgaagccggccgcaaacttgtgaaattatttgaacgggacgatatcgcgatattcaactcgattcccactgttgaaggaacaatcatgatggcgattcagcatacggattataccattcacggatcaaatgtcgccgttctcggcatggggcgcaccggtatgacgatcgcccggacgtttgcggcgttaggagcgaaggtaaaagtgggcgcgcggagttcggctcatttggcccgtataacggaaatggggctttttccttttcaacttgaagagcttactgaacatgtaaatgatattgatatctgcattaacaccgtaccgagcttgattctgaatcaaagcgttttatcacgcatgacgccgaagaccttgattttggatttagcatcccgtccgggcggaacggatttcaaatatgctgaaaaacaaggcattaaagcgctgcttgctccgggtcttccgggaattgtggccccgaaaacagccggacagattattgcgaacgtattgagcaagcttttggcagacttaaagaaagaggggaaataaccatgtctctgaaagggaaaagaatcggattcggattaaccggctcgcattgcacatatgaggaagtttttccgcaaatagaggcgcttatcagtcaaggagctgaagtccggccggtcgtgacatcaaccgttcaatcgaccgatacccgctttggggaggggggagattgggtcagaaaaattgaagaagcaacaggctttgaggcgattgattccatcgtaaaagcggagcctctcgggccaaaacttccgctcgactgcatggtcatcgcccctttaaccggaaattcaatgagcaaactcgcaaatgcgatgactgacagccccgtccttatggctgcgaaagccacgatccgcaacggccgcccggtcgtgctcggaatttcgacaaacgacggactcggtttaaacggaacgaacttaatgaggctgatgtccgcaaaaaacatatatttcatcccgttcggccaggacgaccacgtgaaaaaaccgacatcgctcgtcgccagaatggatctccttccgattacggtagaaaaagctcttttgcaccagcaggttcagccggtgctcgtacaccaccatgaataaaaaatcatgatgacagaaaatcattccggaataaaaaaattcgatcaatccgtgactattctatggtaaaataaaacgtaaaatgcaaagtcaattcaacaaatgatgcttaattggcggaaggagttttacagatgggaagaggattacacgtagcagttgtcggagcgacgggagccgtaggacagcaaatgctgaaaacactggaagacagaaactttgaaatcgaaacactcacactactatcctcaaagcgttctgctggtacgaaagtaacgtttaaaggcgaagaatatacagtgcaggaagctgttcctgaaagcttcgaaggcgttcatatcgcgttattcagcgccggcggaagcgtatcacaaagcttggcgcctgaggctgtaaaacggggagccatcgtgattgacaataccagcgcattccgtatggacgaaaatacaccgctcgtggtgcctgaggtgaacgaaggtgatctgcacaaacataacggcattatcgccaaccctaactgttcaacgattcagatggtggctgcgcttgaaccgatccgcaaagcgtacggattgaaaaaagtcattgtatctacttaccaagctgtgtccggggccggcaatgaagcggcgaaggaattgtacagccagacaaaggcgattttaaacaatgaacccgcagaaccgtccattatgccggttaaaggcgacaaaaagcattatcaaatcgcatttaacgccattccgcaaattgataaattccaagataacggctatacgtttgaggaaatgaaaatgattaatgaaacgaaaaaaatcatgcatatgccgaatctggaagtggctgcgacatgtgtcagactgccgattgaaacagggcactcagaatctgtttacattgagcttgaccgtgatgacgcaaccgttgaagatatgaaacagcttttaaaagaagctccgggtgttacgcttcaggatgatccggcggagcagctttacccgatgcctgctgattgcgtcggcaaacgcgatgtatttgtaggaagaatccggaaagatttggacagagcaaacggttttcatttgtgggttgtttctgataacctgttaaaaggcgccgcttggaactcagtccaaatcgcggaaagcctgcaaaaactgaacctcgtataaacaaacgtattttctataggcgaacagaagagagtaaggctctgcctgctctcttctgttacgtcagactaatttggagtgaaaatagtgaagatcattgttcaaaaattcggcggaacatccgtaaaagatgacaaaggccgcaagcttgcgctagcacacattaaagatgccatcagtgaaggttataaagttgttgttgtcgtatcggcgatgggaagaaaaggagacccgtacgcgacagattctttaatcgggctcctttacggcagccagtccgacatttctccgagagagcaggatatgcttctgtcttgcggagaaacgatttcgtccgttgttttttccagcatgctgaaggaaaacggcataaaagccgcagctttaacaggagcccaggccggctttttaaccaatgcccagcatactgacgccaaaattatagaaatgaaaacagagcggcttttcgctgcacttgccagccatgacgctgtcgttgtcgcgggatttcagggagcgactgaaaaaggcgacacgacgacgatcggcagaggaggaagcgatacttcagcagcggcgctcggcgcggcggtagatgctgagtttatcgacatttttacggacgtggaaggcgttatgacagccgatccgagaatcgtggaaaatgctaagccgcttccgaacgtcacatatacggaaatctgcaaccttgcctatcaaggcgcgaaagtcattcatccgcgcgcggtggaaatcgccatgcaggcaaaggtgccgatccgcgtgcgctccacttattcaaaagacaaaggcactttggtgacgtcccatcattcgtctaacatcggcagcgatgtattcgaacggctgatcacggggatcgcccatgtgaaagatgtgacgcaatttaaggtccccgccaaaatggggcaatacaacgttcagactgaagtctttaaagcaatggcaaatgccggaatcagcgtagatttctttaacattacgccgagtgaaatcgtatataccgtagccggcagtaaaacggaagccgcgcgcagcattttggctgaattaggatatgagccgacagtgacggagagctgtgcgaaagtgtcagcggtcggcgccggaataatgggtgttccgggtgtcacgtcaaaaatcgtctccgcactttctgataaaggcattccgattctgcaatctgccgacagccatacgacgatctgggtgctcgttcatgaaaaagatatggtaacggccgtaaatgcgctgcatgaagtgtttgaactttcaaagtaaatgtgattgaatcatgatgaggtgaaaaaaatgaatgtcggaaatatatctacagcgatgattaccccctttgacagtaaagggaatgtagactttcaaaaactgtctacattaatcgactatttgttgaaaaacggcacggattctttagtcgtcgcaggcacgaccggcgaatctccgacactttcaacggaagaaaaaattgcactctttgaatttacagtcaaagaagtgaacggacgcgtgcctgttattgcgggtacgggaagcaacaatacgaaagactccattaaactgacaaaaaaagctgaagaagccggcgtcgattgcgttatgcttgtcacgccgtattataataagccttcccaagaggggatgtaccgtcattttaaagccattgcggaagaaacgtctcttcctgtgatgctttacaacgtgccgggcagaacggtcgcttcgcttgcgccggaaacggccatcagacttgcggagataccgaatatctctgcgattaaagaagcgagcggcgatcttgatgccattacgaaaatcattgccgaaacaccggaagatttttacgtctattcaggtgatgacgggttaacgcttcctattctcgcagtcggcggaagaggagtcgtgtcagtggccagccatatcgtaggttctgacatgcagcagatgattaaaaactatacgaacgggcagacggcaaccgcggcactgattcatcagaagcttctgccgatcatgaaggagctctttaaagcgcctaatccggctccggtcaaaacggcgctacagctgaaaggccttgatgtcggatctgtgcgtcttcctcttatcccgctgaatgaagatgaacgtctgagcctgagcagcgtcatcagcgaactgtaagaaaaaatttatacagttaaaatacgcggtcattctcatttttatcgtgagtttgaccgttttgtatacatattggttttccctaaaccttccgcttcttcttgttttctaaaattgatatcagttataataggaacaagtgatgatggacgggtatgagactaggaggatacagattttgaaaaagaaaaatacagaaaacgtcagaattatcgcccttggcggcgtcggagaaattgggaagaacctatatgtcattgaaattgactcagacatatttgtagtggatgcagggctgatgcaccctgaaaatgaaatgctcggtattgatgtcgtcattccggatatttcctacttagtagaacgggctgaccgcgtgaaggccatctttctgacacacgggcacgatgaaaacatcggaggcgtcttttatttattgaacaagctgtcggtgccggtatacggaacgaaacttacgcttgcattactgagagaaaaactcaagcagtacgggcataatcgaaaagctgatttgcgtgaagttcactctaaatcagtcattacatttgaatcaacgaaagtatcgttctttaaaacgattcacagtattccggattcagtgggagtcagcttcaaaacatcacttggctctattgtgtgcacgggagacttcaaatttgaccagacgcctgcttatcaccaatcatgtgatattggcgaaattgccaaaatcggaaacagcggcgtgctcgccctgctttctgacagcgccaatgcggagcgcccggggtatactccgtcagaagcatatgtaagcggtgaaatttccgatgcgatgaacaattcagaaaaccgtgtcatcattgctgtattcgcgtctaatatcaaccggatccagcaagtgatacaggctgccgtccagaacggccgcaaacttgcaatcgccggaaaaaatctgcaaaacgtgcttcagctggggcgcaagctcggctatattgaagccgaagatgaaatgtttattcctgtgcaggatgtgaaaaaatatccgaagcgggaagtggcaattgttacagccggaagccatggtgagccgctggccgctcttacgcggatggccaagcaggcgcacaagcagcttaacattgaagaaggagacaccgttgtcattgcatcaacaccgattccggggcatgaattgatatattccaaaaccgtcaacctgcttgcccgcgccggcgctcaagtcattttcgcccaaaaacgcgtgcatgtgtccgggcacggttcgcaggaagaattgaaactcatgcttaatttgctgaaaccgaaatatttaattccggttaacggtgaattcagaatgcaaaaagcgcattccaaaatcgcagaagagatcggcatgaaacgcagcgatattttcttgattgaaaaaggtgacgtcgttgaattccgcggccagaatgtgaaaatcggggataaagtcacgtacggaaacgttctgattgacggcctcggagtcggcgacatcggcaacatcgtgctgagagaccgccgcttattgtcacaagacggcattctcatcgtcgtgatttcactcgataagcagaaaaagaacctcgtatcaggtcctgagatcattacgcgcggtttcgtgtatgtcagagaatcagagggtctaattgtacaagctactgagctcgtccgctctatcgtgactgaagcgacggaaacatctgccgtagaatggtccacgctgaaacaagccatgcgtgatgcgctgaatcaattcctttatgaaaaaacaaaacgcaagccgatgatcattccgatcattatggaagtataatgtatacaaagccggagcgcatgatgctccggctgtgtttttgttcatgtcccggatggaaatcatcatctttgttcataatacaaagagacattcggaaagggtgaaagataaaatggatcatcgtatggaaaacaccgaagaacagcagcccgaaaaatcagatgcgaaagacagcattatgagcaaaattcagcagctgggagagacatctctgccgcaaatgtcccaagataccaatattcactgcctgacgatcatcggccaaattgaggggcacgtccagctcccgccgcaaaataaaacaaccaaatatgaacacgtcattccgcaaatcgtcgccattgagcaaaatccgaaaatcgaaggacttctgatcatcttaaacaccgtcggaggcgatgtggaagcggggcttgcgattgcggaaatgctcgcatccttatcaaaaccgaccgtctcaatcgtactcggcgggggacactcgataggtgtgccgatcgccgtgtcatgtgatcatagttttatcgcggaaacagcgactatgaccattcaccccgttcggcttacaggtctggttatcggggttccgcaaacatttgaatacttggacaaaatgcaggagcgggtcgtcaactttgtgacccatcattcaaatatttccgaagaaaaattcaaagagctgatgttttcaaaaggaaacttaaccagggacatcgggacgaacgtagtcgggaaagatgcggctgattacggattaattgatgccgtgggcggcgtcggacaggcgataaaaaagctgaaccagctgattgaggaacgaaagggcgaggaaggaaggatgattcaatgatcctttataccgtcatgccccaagaagtcgtttacggtcaggatatagagcaaagcgtgcatgaacaggtagattacgccggcgtgccgctgctagttgagatgaagggaaatgaagctgaagtcgtacagattttaagtacgaacccgatggatttcttgaatccggacatcgctccgggacaaaaaatcaagctgaaaatctaaccggcattcagtccgtttctcgggggcaaaatatgctataataggggaatcctacagaaaaatgcagccggcaaaaggctgcttttcttcatgatgtatgattttacattttttaacgcagtaaggtgatgagtgtggcaaagaaaaaacggaaatctaaaaagaaacaagagagtaagctcaatctaaaatacgaactaagcggactgctctgtgttgcaatctcaattattgctgttttgcagctcggcgttgtgggacagacatttgtgtacttgttccgtttttttgccggagagtggtttattttatgcttaattgcgctcttccttctcggaatttcgctgttttggaaaaagaagagtccaagccttttaacgagaagaaaggcaggattgtactgtattatcgccagtatattgctgctgtctcacgtgcagctctttaaaaatctgtctcatcacgggtcgattcggtcggcaagtgtcatcggcaacacgtgggagctgtttatgattgacatgaaacagcaggctgcttcccctgatttgggcggcggcatgatcggcgcggtactgtttgcagcttcccactttttatttgcatcaacgggttcacagatcatggcgatcgtgctgatcttaatggggctgattcttgtaacgggccgttcactgcaggaaacgctcaaaaagtggacgagccccgtcggccggtttatccgcggtcaatggcaggcatttcttgaggatatgaagacggtcagaacgaatatgtcttcgccgaaaacaaaaacaaaatcgggcaaaaaacaaaaacaggttcaaaagaaaaaagaagagcctgaaccggaggaagaggatgaggaaatcatttcgccgatcatccattcagagccgattatttcaagcttttcagaccgtcaggaagagccctccaaaccgctgattccggaaaaaacgcaggaggctgcacaagcggcaaaagatgagccttccggcggcgctcaagacagtggcgaaacggctgcggctccgccgatgacgtttacagagcttgaaaataaagattatcaaatgccttcattggacatactggctgacccgaaacataccggccagcagaccgataagaaaaacatttacgagaatgcaagaaaactcgaacggacttttcaaagcttcggcgtaaaggcgaaagtgacgcaggttcatctcggtccggcggtcacaaaatatgaggtgtatccggacgtcggggtcaaagtcagtaaaatcgtgaatctgagcgatgacctcgcgctcgcgcttgccgcgaaggatatccggatcgaagcgccgattccgggtaaatcggcaatcggcatcgaggtgcccaatgctgaagttgcgatggtttcgttaaaagaagtgcttgaatccaagctcaatgacaagccggacgcgaagcttctgatcggcttgggacgaaatatttccggggaagccgtgcttgccgaactgaacaaaatgccccatctgctcgtagcgggggcaacgggaagcggaaaaagcgtctgtgtcaacggtattattacgagcattctgatgagggccaaaccgcatgaagtgaagatgatgatgattgacccgaaaatggttgagctgaatgtgtataacggcattcctcatctgcttgcgccggtcgtgacagatccgaaaaaggcctcgcaggctttgaaaaaggtcgtcaatgagatggagcgccgctatgagctgttctcccatacgggtacgagaaatatagaaggctataacgatcatattaagcggtcaaatgccgaagaagaagtcaagcagcctgagctgccgtacatcgtcgtcatcgttgacgagcttgccgatctgatgatggtcgcttcttccgacgtggaagattcaattacgagactttcacagatggcgcgggcggcgggaattcatttgattatcgcgacacagcggccttcagtcgacgttattaccggtgttattaaagccaacatcccgtcaagaatcgccttcagtgtctcatctcagaccgattcacggacaattttagacatgggcggcgctgaaaagcttctggggcgcggagacatgctgtttctgcctgtaggcgcaaataagccggtgcgtgtgcaaggggcattcttatccgatgaagaggttgagcatgtcgttgatcatgtcattacgcagcaaaaagcgcagtaccaagaagagatgattccggaagaagtttcggaaacacacagtgaagtaacggatgatctctatgacgaagcggtcgatttgattatcggcatgcagacggcatcagtctccatgctccaaaggcggttcagaatcggatatacgagagctgcccgtctgattgacgcaatggaggaacggggcgtcgtcgggccgtatgaaggaagcaaaccgagggaagtactattatctaaggaacaatatgatgagctctcttcttaaaaaggagagagttttcactgaaaatgatatcaccaaaatcattcctatttatttttttattaaaacatgatatagttgtcccaattgttcaataatttatgaaagtggtttacggaggggaaacatgtctacaaaagctgacaatcgtcacttgtatctaaaagtgattgagcgaatcaaagaggatatacaaaacggaatttacaccgaaaaggaaaagcttccttctgaatttgagctttcaaaatcaatgggtgtcagccgggcaactctgcgtgaagctttgcgtatccttgaagaggagcatgtgattatcagaaggcacggtgtgggcactttcgtccatacaaaaccgctgtttctttcaggtattgaacagctcaacagcgtgacgaaaacgattcagcaggcgaacatggtgccgggtacgatttttttgtcgtctcaggtcatcacgccgtctgatgaagatatcgctagattccggcttgagcctgagcaggagcttttttatttggaacgcgtgagaacggcaagcggcactccggtcgtttactgtttagatacgattccgatgcacattctgccgaattctttctgtcatgaacaggagtctatttttgatcttttggaaaaaaactccgggtctgtgatcagctatgccgttgctgatatcgaaccgatcggatatcacgatacgatttcaccggttttggaatgcgagccggagacggcgcttttattgctgaagcaaacccactataatcagaatgatgaacctgtgctgtattcattaaattatttccgggctgataagttcagttttcatgttgtaagaaaacgtttttaagacagacgcgtcatgtgtctgtttttttatttgccgtttcagtacatactttgttttctgcaaggcacaataaaacaggaaacaaccaagtatagtgaatgggtgaataagttgagtaagaagaaaaatggaacgaaaaatatcattgctctggcttctgtaccgctcgtgatgacactcgggaattccatgctgattcctgtgcttccgatgattgaaaagaagctgtccatatcgtcttttcaagtatcgttaattataacggtctattcgattgtggcgattatttgtattccgattgccggatatctgtccgataaattcggaagaaaaaaggttcttctgccttgtcttctcatagccggtgcgggcggagcgcttgccgcgatagcttccaccgcgttcaagcatccttatcccattatcttggcggggcgggtgctgcagggaatcggttcggcaggggcggctcctgtagtgatgccgtttatcggtgatttattcaaaggggatgatgagcggattaccgcggggctcggcgatattgagacgtctaacactgccgggaaagtaataagcccgattctcggttcgctcttggctgcatggttttggtttatgccattttggttcattccgtttttttcgctcatcagtttttttctcgtattgtttttggtggcaaagccggaggaacaaaaagaagcgccttctatttccgaatttgtgaaaaatgtcggccgcatatttaagcgtgacggacgctggctctttacggtttttatcatcggctgcgtgattatgtttttgctgttcggggttcttttttatttatcagactcactggagaagaaatacggcattgacggtgtggctaaaggagcgcttttggcaatcccgcttttatttctatccgtcagttcatatatagcaggcaggaaaatcggaaaagaccaaggcaaaatgaagttttgcatcgttttcggaatgagtgccgtgacactgtcgtttatcggcctatggtggaatcacagtttttatttattatttatctttttgtgtgtcagcggtatcggtatcggaatggcattgccggctttagacgctgtcatcacagaaggcgtagacaacgaggaatcgggaaccatcacctcattttataacagcatgcggtttatcggagtagcggcgggaccgccgatctttgctgccctgatgtcaaatgcaggctggctgatttttattttatccgctttttgcggcattgtgtctgtatttttagcgctgttaaatatctcatcacaagcaaaagaaaaaaaggaatcattaaagacggtgtaatctgcactgtcttttttttattttattttgaagattgacatgataccgtcaagtcgttatcctttttaatagttaaacatattaactatcggaaggagggggaaaaggtgcatgaagaaaaagtaaagcagctgattcagcgttattccgatgtatacctgcacgtcttaaaaaaaattgacagcattatcgctgaaaaagtgaacaaagaactgacattggatcaatattacatcctccgctatattatgctcaatcccgattgcaaatcaattgaactggccgcggtgtgccacgtcaacaaaagcgccattacatctatgacgaaccgcctgtatgaaaaaggctacatcaatagagaacgcagccaaagcgaccgccggagcatacttttaaatgtcacggaaaaggggacggaagtatttcaccgtgtggagcggcggattgaggaactcgtccgatcatatattatgtattttgatgaagacgaggcggagatgttcgtgaatacatatgaaaaattatatcgattgatgatgactgaggaggatcagcagacataatgaaaaacattatccgagcccgctggatcatcgccgcggtgtgggtcgccgcaacggtgatatttatgcttacagcgcctgatatggctgaattgacacgggagaaagggcagatttccgtaccggacggatattcctcttcttacgcccatgaattgcttgatgaaatgtctgattcagatgcaccgtcttcttctgccgtcatcgtattccacgaaaaaggcttaatgacagacaaaaaagatcgtctggaagaagccgtcagcactttgtctgaacataaaaaagcgcttcagattaaaacggtgacttcatacttcggggagaaaaatgacgacattaaaaaacagctgctctcaaaagacagacaaacgatgctcgttcagctgcagcttgatacatccaaaaacgatatcatcgaaataaaaaataaaatagataaagagctgaaaccgtacggcgtatcatacggcattacaggccaatcgctgatcgacgaagatgtgttaaaaagctcacaggacggcttgaaaaagactgaatatataacggtcgcttttatcctgatcgtgctgatccttgtatttcggtcagtggtcgctccgttcgtgccgcttttatcagtattgatatcttatttagtcagccagtcgattgtcgcatttttagtcgatcagctgaattttccgctctcaacttttactcagatttttatggttgcgattatgttcgggatcggcacagactactgcattctgcttctcagcagatttaaagaagaactgtcgcatggcgctgatataagagaagcgatcgtcgtcacctacaaaacggccggaaagacggttttgtacagcggcggtgcggtgctgatcggatttgcctgcatcggatttgcgacatttaagctgtatcagtcggcagcagccgttgcggtcggtgtcgcggtgctgctgcttgcgctcatgacgatcgtgccgttttttatggctgttttaggaaaaagcctgttttggcctgttaagggcgatatttcgcatcctcaaagcaaagcatgggaaacgtcagggcggttttcatttaaaaggccgctcatcagtcttgcaatcgttgcggtattcaccgtcccgcctatccttctttacaaagggtcgctgtcttacaacagtcttgacgaaatcggggataaatatgaatccgtccgcgcgtttcatacgatttcagacgccttcggcccgggagaacttcttccggccacagtcgtcatcaaaaatgatgagacattaaataccgaaaaacacctgattgatatcgaaaaaatcagcagagaacttgaaaaaacagagggtgtaaaaacggtcagaagcgccacgcgccctgctggaaacggattgaatcaattatttgtcacaaatcaggcaaagcagcttcaagaagggcttgataaaggcaatacaggacttgaaaaaatcacggacggattagggcatgccgcaaagtcgttagctgattcacagccgcagatcgaagagtcggggaatagcgtcaatcagcttattgacggaacattgtctctgaaatccgggctttctgatataggagaaaacctgaataaactgcaggctggcgtgaacgagaataaagccggcgtcgcccagatgagaaagcagattgaagagcaaaaacaaatgctgacttcacagctcaaacaaaacagcggtctcgcttcagaaacgcaaaacgctttaaaatcggtaaaaaccgtcctgccgatgaaagatgaagccagcagacagcttgccgatttgaacaagcagcttgcccggctgccgtttgcaaaattggaagcgtcaataccgtcagtcaaaaccgatccctcttaccaagaaatcaaatcagcctttacgggtgtacagtcagccgtttccaaggcaaacgcggatgcagaagcgttttctaaacaggtcgacagtcaaaaggctcatctgcagcaagcggaaaaacaatttgcccgactggcagccgctcagaagaagattgacactcaaattaacgcaatgatcaatggtctgaccagtattgaaaacggtctgcagcaagtgtcagacggacagggggctctcgcgggacaaatgccgcgccttgaatcggcggcaggacagctcgcggagggccagaaaaaaatgaagagcggccttggtgatttttcttcccggctcagcgatctttcttcaggccttaacgatagtgtaaaagggcttaagaaagtatcaagcggcatgatgggggcgaatgattacctgggtgagcttcacaaggcgtcagacaaagaaatgacaggctggtttgtgccgaaagacgcgttgacaaacagtgatttcacaagcgtgtttaatacgtacatgtcagatgacagaaaaacgacagaattgaccgtcgttcttgataacaatccttactcaaatacggccattcaagatattcaagcgatcaaagcgagcgtaaaaagagccattccgaacacggatctgaagaatgcttccttcggcgtttcgggagtctccagcatgaatgccgatctgaaggaagtatcggattcagacttcaaacggacggccatgtttatgctggcgggaatttttctgattctcatcgtgatgctgcgctccctcattatgcctgtttatttagtggcgtcgctcgtactgacgtatttcgcatccatcggcgtgacggaatacatctttacacacttcttcgggtacccgggcgtaaactgggccgtgccgttcttcggctttgtcattttgatggctctaggcgtagattattccatctttttaatggaccgctttaatgagctgaaaaaagaaggaacggaacccgcaatgatcagcagtatgaaaaatatgggttccgtcatcatttctgcggcgattattttagcgggaacctttgcggccatgctgccgtcaggcgttctttccttattacagattgcaaccgtggtattaacaggccttctcatgtacgcaattgtcgtccttccgttttttgtaccggtcatggtgaaaatattcggaagcgccaactggtggcctttcaatttgaaaaaataacgttcaatgcctctgcctgttttcgggcagaggttttttgtttccttataaatcctccagttgatataattacatctgcgcactcttttttgcgaatgctgaaatttggtcataatacatactatgaaagaatgaacgaaggaggtttcacatgacttacgtaaatgaaatgaagtcaaagcacggcgggatcaccgcccacatcgtaaagaccgagaaatttaaaaccgtttcgctgacgtttaaaatgctggctcctttaacgaaagagctcgtaacaaaaagggcgctgtttccgcatgtgcttctgcgcggaacagaaagccgcccgaaaaccgctgatctgcggtcttattttgatgaactgtacggcacatccgtttcagctgatctgacaaaaaagggagaacgtcatgtcattacgttcaggcttgagattcctaatgaaaagtatctgaaggaccgcacaccgttattggaaaaaggccttcagcttttatcagagcttgtcttttcgcccgctttggaaaacggcgccttcctgcccctttatgtcacgcaggaaaaacggacgctgaaacagcggattcaagccgtatatgatgataagatgaggtattctaatctgcgtctcgttcaggaaatgtgcaaaagcgaaccgtatgcccttcacgtcaacggcgagttcgatgatgttgaacacattacaccgcaagatttgtatgaagcctatcaaaaagccatacgcgaagatcagctggacctgtacgtcatcggcgatgttgatacagatcaggtgaaaacggccgttgatacgtattttaaaacggaagaacgggagcttcagccttttgaaagaagcgcggcgaatgagcagcccgatccgaaggaagtcattgatgaagaggacgtcaagcagggcaagctgaatatcggattccggaccaatacgacatatacagatccggattatcctgcattgcaggtgtttaacgggctgttcggaggtttctctcattcaaagctgtttataaatgtccgtgaaaaagcgagcctcgcctattatgcagcctcaagggtggaaagcttcaaagggcttttgatggtcatgtcgggcattgaggtgaaaaattacaagcaggccgtcaccatcattgaagaacagtttcaggctatgcaaaacggtgacttttcagaagatgatatcgcccaaacgaaagccgttattaaaaatcaagtattagaaaccattgatacggcatacggcttagcggaatttctgtatcagcaggcctcagcccaagtagagataccgatcgaaagattccttgacaatatcgagaaagtgacaaaagaggacattatcaatgtcggaaagaacattaagctggatacgacttatttcttaaaagggacggggggagcatcttgactaaaccgataaacttcgaacagcttcaggaaacgctgtatcatgaaaaaatggcaaacggccttgatgtctatgtgctgccgaaacagggctttaataaaacatacgccgtgtttacgacaaagtacggttccattgacaatcaattcgttcctttaaataaggaagaaatggtacacgtccctgacggaatcgcgcattttctggagcataaactgtttgaaaaagcggacggcgacgtgtttcaggacttcagtaagcagggggcgtcggcaaatgcctttacatcatttacacgaaccgcttatcttttctccagcacttctaatgtggagaaaaacctggaaacactcgtagattttgttcaggacccgtatttcacggaaaaatcagttgaaaaagaaaaaggcatcatcggccaggaaatcaatatgtatgatgataatccggattggcggctgtttttcggccttatcgaaaatatgtataaagaccaccccgtgaaaattgacattgccggaacggtggagagcatctcacatattacgaaagatctgctgtatgagtgctatgaaacgttttatcacccgagcaatatgctgctctttatcgtcggtcccgtagatcctgaagcggtcatcagccaggtgcggaaaaaccaggagaaaaagccgtttacagaccagcccgaaatcaaacgtgaagaagttcaggagcaggaagcggttttccgccgggagcaggaattaaaaatgaacgtgcaaggctcaaaatgtcttgtcggcttaaaggcgaaagatccttataaaacggggcaggatctgttgaagcacgagctcagcatgaacctcatgcttgaatgtcttttcggaaaaagctcaccgcattacggtgacttgtacgacaaaggctacattgatgaaaccttcagctttgattacacggctgaatacggattcggttttgcctctgtcggaggagatacaccggagccggataagctcgctgacgaattaaaacacatgctgcttgatgcagaatcagccgtgactgcggaaaaacttgatcttgcaagaaaaaagaagatcgggtcattcttaaaagcgctcaattcgcctgaatatatcgccaaccaattcacacgctacgcctttttagatatgagtctgtttgatgtcgtaaccgtactggagcagattacgctggaagacgtaaagcgggtcattaaagaagaaatatcagaagacaggctgacagtctgcaaagtcgtgccaaaatcataacaaaaacatccctcacgccctgagggatatttttctggggaaagaaggagtattgattgatgaaacagacagcgctcgtaaccggagcaagcggcggaatcggacaaagtataagtgaagtcctcgcaaaaaacggatatgacgtcctcttgcattatcattctaataaggaagccgcacacaggcttgcggaaaggctgagcgcatcattcggcgtaaaagcctccgttattcaggcggatctgtcctcaccggatggagcggagacactcagccgttccgttaagcagcctgtggatgctctgatattaaacagcggcaaaagtcatttcggcctgattacggacgttacggatgacacggcgcgggagatggtgcagctgcatgtaacgagtccgtttcttttggcgcgtaatctgatgcccggcatgatccggaaaaaaagcgggggcatcgtcgcgatcggttccgtctggggagaaacaggcgcatcgtgcgaggtattatacagcatggtcaagggagcgcagcattcgttcgtcaaagcgcttgccaaagagcttgctccgagcggcgtccgcgtgaatgcagtctcgccgggtgccgttgatacaaatatgcttgatcagttcacgtctgatgaaaaagaagcgttggcagaggaaattcccgcgggccggctggcaaagccggaggaaatcgccgaagcggcggcctttttattatcggacaaggcttcctatattacggggcatatattatccgtaaacggcggctggcactgctgaaaaaaatgtgtgtatagtttgcatctgtacggacaaaataattttgtaacaacagatgaaatggaggaacccaacatgtcagtattagaaaactgggataattggaagaatttccttggcgacagattgaactatgcgcaggaaaaagggatgagtgatgaaacgatcactgacctcgctacagaaatcggcggttaccttgcgaacgaagtcgactcgaaaaaccatcaggaaaaagtgcttgctgatctttggagcgttgcttctgaagatgaacagcgcgccatcgcaaatatgatggtgaagcttgttgaaaataacagcactcattaagaggggggatttctcctctctttttttatgttttcctctatagagcaacattcttctttctaattagagaaaaatgttttatgataaaggaaggtaaaaatttgccacaatggagggggtatatcatttggcaaagctcgaatggtattttgaatatgaaattcaagtgaaccgccccggcctgctcggggatatttcatctcttctcgggatgctgtcaattaatattgtcacaattaacggtgtcgacctttccagaaggggaatgctgctcagatgccggcatatagatcaaattaaacgattggaatcaattttaaaaacaatggagaccattaaagtaacgaagctgagagaaccgaggcttcgcgaccgtctcgcagttcgccacggaagatacattcagcgtgatgccgatgacaaaaaaaccttccgttttgaaagggacgagctcggtcttctggttgactttatggccgagctgtttaaaaaagaagggcacaaactgatcggaatccggggaatgccgagggtcggaaaaacggagtccatcgttgcgtcaagcgtttgtgccagcaaaagatggcttttcgtatcatcaacgctgctaaaacaaacgatccggagccagctggttgccgatgaatacagcacggaaaacgtgtttatcctcgacggcatcgtttcgacaagacggggatctgagcgccatcttcagctcgtcagtgaaattatgcggcttccggcgacaaaggtcgtggagcaccccgatatttttgttcaaaattcggagtatacgctcgatgatttcgattatattatcgaactcagaaatgatcctgacgaagttattacatatgaacatgcagaagaaccgcaaatatttgatcagaccggtttttcaagctttgatttttaatattggaaggtgtttgttgtgacagaattagcaatccggcttaaagaagccagagaggaaaaagggatgtcattggatgaactccaggcggcgacgaaaattcagaaaagatacttaaccgctctggaagaaggcaattatgacgtcattcccggcaatttttatgtgcgggcgtttatcaagcaatacgctgaagctgtcgggcttgattcagatcagttatttgaagaatataaaaaagacatccctaacacgtaccatgacgatgtgtcggaaaaaatctccggtctcgccatgcaaagggagcttcctaagtccgcttcaaaggcggcggaatggcttccgaccgtccttgtcgtcatcggtgtcattatcgtcatcgcgatcatttatgcgattattcagctcggaatgagcaaatccgggcagacagacggagataaggcagtcacccaaagtgagagcaagtatgagattcctaaggattctgcgctgaaaaacgacggcaatacaaatgacgaagcgcaatctgacagcaaaaaagacaaaaaggacacaaaagcgtcagagcagaaaaagaaagaaaaaagcagtgaaaagacggagatcaaagcggccggaacggaaggctcggcttcttcatacaacgtctccggggcagataagtataagcttgaactgattgcttctgacagcgcatggatccgcgtccgtgatgacagcggcggttctttaaaagaaggaacactgcaaaaaggcgaaacctttaaaaaagacgtcacggatcaaaagcagattgaaatccgcacgggctatgcccctaacctgaaaattaaaatcaacggagaggttctgtcctatgaactcaatccgcatgatgtaatggcgcagaccatcacaatcaagatgaaaaaataaaaggggaaaagtcatctgaacgattaagatgactttttcttcacgtccgagtacatattattggaggggctttatgtttaacttaccgaataaaatcacactggcaagaatcgctttaattcctgtatttatgattatcatgcttgttccttttcagtggggcagcgttcatataggggatgaatcgattccggtcgcacatcttacgggagctgttttgttcattatcgcatcaacgactgactgggtggatggctactacgccagaaaactgaacctcgtgacaaacttcgggaaatttttagatccgctggctgacaaactgctggtgtccgcggcattaattacgcttgtgcagtttgaccttgcgccggcgtggatggtcatcatcatcatcagccgcgaatttgccgtaacgggattaagacttgtgctggcgggaacgggggaagttgtagccgccaatatgctggggaaaattaaaacatgggctcagatcatcgctgttgccgcgcttttgctgcataatcttccgtttgagctcgtttctttcccgttcggcgatatcgctttatgggtggccgtgctgttcacagtcatttccggctgggattattttgcgaagaactgggatgcgttaaaaacatctaactaagaaagaaggacttaaagatggaaatagcaaaaaaagcagaaatcattgcagtcggctcggagcttctgctaggccagatcgccaatacgaacgcgcagtttatcagtaaagagctggcggaaattggtgtaaacgtgttttatcataccgctgtcggtgacaatccggagcggcttaagcaagtcatccgcattgccgaagagcgctcagacctgattattttttcaggcggcctcggaccgaccaaggacgatttgacgaaagaaaccattgcaaacacactggggcgcccgctcgttctgaatgacgaagcgttccggtcgatcgaagaatatttcgcgaaaacaaaacggaccatgtcgccgaataaccgcaaacaggcgctcgtcattgagggctcagacgttttggcgaatcatttcggcatggcgccgggaatgcttgcagagcacggctcaaggctttatatgctgcttcccgggccgccgagcgagctgcgtccgatgtttgaaaatgaagcgaagccgctgcttcttaaaaagctcggttctaatgagaaaatcgtttcaaccgtgctgcggtttttcggaatcggtgaatcccagcttgaagctgatttagaagatatcattgatgcgcagacgaacccgacgattgcgccgcttgctgctgacggagaggtcacgctgcgtttaacggcgaaacatgctgacgaaaaagaaacagaacggcttttaaaagaaacggaagccgccattttagaacgtgtcggtgaatttttctacggatatgatgatacgtctctggtgaaggagctttcaaaagcatgcagacaaaacggaattacgatttcctctgccgaaagctttacaggcggcctgttttcagagtgggtgactgatttaagcggtgcgtctcaactatttgcagggggcgttgtctgttattccgacagcgtgaaacagcatgtgctcggcgtgaaagctgagacgctcgcagaaagcggagcggtcagcaaagagtgtgcgaaagagcttgcagccggtgtgagaaagctgaccggaagcgatatcggcatcagctttaccggggttgcgggtcccgacccgcaggaagggcatgcgccgggccgcgtctttatcggcatttcggcggaaggaaaagaagaggtgcacgaatttaactttgccggctcaagaaccggaatcagaaagcgcgccgctaaatacggctgccatctcattttgaaaatgctggatcaaaaataaagttttaaagaggcgttttctctgatttttaagttttacaagggaaattatgctcttttgcagaaaagcgaacgcggaaaaaatccgaatatgcgttcgcttttttcttggcaaatgccagtaaacaaggtatagtatatgtagtggcaagataaaggaggaaaaaataaatgagtgatcgtcaggcagccttagatatggctcttaagcaaatagaaaaacaattcggcaaaggttccatcatgaagctcggagaaaaaacggatacaagaatttcaacggtgccaagcggttcccttgcacttgataccgctctcggaataggcggatacccgcgcggacggattattgaagtatacggacctgaaagctcaggtaaaacgactgtagcgcttcacgcaatcgctgaggttcaggaaaaaggcggacaggcagcatttattgatgctgagcatgctcttgatcctgtttacgcgcaaaagctcggtgtcaatatcgaagagcttctgctttctcagccggatacgggagagcaggcgctagagattgctgaagcgctggtgcgaagcggagctgttgatatcgtagtcgttgactctgttgcggcgcttgttccaaaagctgaaattgaaggtgacatgggtgattcacacgtcggtttacaggcgcgtcttatgtctcaggcgctccgtaagctttccggcgccatcaataaatctaaaacaatcgcaatctttattaaccagattcgtgaaaaagtcggcgttatgttcggaaatccggagacgacaccgggcggccgcgcgctgaaattctattcttccgtgcgccttgaagtgcgccgtgccgagcaattaaagcagggcaacgacgtgatggggaataaaacgagaattaaagtcgtaaaaaacaaagtcgctcctccgttccgtacggctgaagtggacattatgtacggtgaaggaatctccaaagaaggggaaatcatcgaccttggaactgaactggatatcgtgcaaaaaagcggttcgtggtattcttatgaagaagaacgcctcggtcagggccgtgaaaacgccaagcagttcttaaaagaaaataaagacatcatgctgatgattcaggaacaaatccgtgaatattacggtttagacaataacggtgtaacggacaaagcggaagaagttcaggaagagatggaattagaagaataaaaacacgatcaaaagagcggaataagcaatttccgctctttttttgtgtgtttcaaaaaaacactggctgtttcggaaaattttatctggaatgttacaacttttttcacccttcactcgtctaacatcatggcgaaagttgaaattatatctgaggaggaaaaaagatgacgagcccccgccgcacaagaataaataaaaaaagaaagaagaagctgatgaaaacgggagggctgtttctttttctgctgcttgtcactgtttttattatgatctggaccgtcacagcgcatcaccgggagaaggaatccgttaaaaacgctcccgccgctcaatctgatacttcaaaagaccagactcaacagaaaaaagaaaagacgcaaaaagagaaaacacctaaatcaatcgatcacaataaacagatcagcaattacttgcaacagatcgggttcagcggcacagcaatgatcgtaaaagatggaaaagttgtgctgaaaaaaggctttggctatgcggaccgaaaacaaaaaattaaaaacaatccggagacatcatattatatcggttcttcacaaaaagcgttaatcgcgacggctgtcctgcagcttgaagaaaaagggctgctgcagacgagtgaccccgtcagtacatacttgccgaattttcccaacggcacgcgcattacattgaaaaacctgctcaatcatacgtccggcataaacgggcatattgagggacagggaccgatttctccaattgatttaatcaaggatatagaataccgcggaattaaacggcagcccggggtttgggattacagggattccaactattcagtgcttgcttatatcgtatctcaagtcagcggggagtcttatgaacaatatataaaagaacacgtgttcaaaccggccggaatgaagcatgccggattttacaaaacatttgtcaaagccaaatatcctgccgtcggctacaaagtcgatgagagcggcagtcttgtaacgccgcaccttttggacttatcgcagctgtacggggcgggcgacatgtatatgagcgctgaagatctctataaatttgataaagcgatcgtaaacggcacgctcctttcaaaagaaagcttcacaaaaatgtttacagcaggaagcagtgccgcttacggcatggggttttacattgatccgggaagctattccaatcacggtgttatgcccggttacaacattttgaacagcttcagccattcggcaagcaaatatgtcatattactgtcaaacattcagaataacgccaaattaggacaggtaaacaatagaatttaccaattgcttaaccaggcggactaacagagccgtcattcacaaaaagcggatgaaggtatggtatgatatatacatgggcgaagatccgagctgaaggcgaatcgttaagctggcaagcttgacaagtatttccgacacaattacaatgaagttgtaacatttgtttttttaacatgattgttaaaccatttaaacttgacaagggcatgagagactcattccctgtgaaggttctgtatgttgagaaaatcagacaatgtacatgccggcacttatttaagcaaaaaccaagttcatagcaagaggaggtgaaagtatgaccccaatgacggttctcatctccattttgctgactctgctcggtttagttgttggctactatgttcgtaaaaccattgccgaagcaaagattgcgggcgcacgcggtgctgccgagcaaatccttgaagatgcaaagcgtgatgctgaagcactgaaaaaagaagctctgcttgaagcaaaggacgaaatccatacacttcgaatagatgctgaacaggaagttcgtgaaagacgaaatgagcttcaaaaacaagaaaaccgtttacttcaaaaagaagaaaatcttgaccgtaaacatgaaggaattgataaacgggaagcgatgttggagaagaaagatcattctctgaatgaacgacaacaacatattgaagagatggaaagcaaagtggatgagatgattcgtatgcagcagtcagaactcgaacgcatttcgagcctgacacgggatgaagcgaaacaaatcattcttgaccgggttgaaaatgagctttcacatgacatcgccatcatgacaaaagaaaccgaaaaccgtgcgaaagaagaggcagataaaaaggcgaaaaacattctgtcgcttgctttgcagcgctgtgcagcagatcatgttgccgaaacgacggtatcggtcgtcaatcttccgaatgatgagatgaaaggacgtatcatcggccgtgaagggcgtaacattcgtacgcttgaaacgcttacaggtattgacctgattattgatgacacacctgaagcagtcattctttccggatttgatccgatcagacgggagacggcaagaatcgctcttgataaactcgttcaggatggccgtattcacccggcgcgcattgaagaaatggttgaaaaatcccgccgtgaggtagatgactatatccgggaaatgggtgagcagacgacgtttgaagtcggcgttcacggactccacccggatctgatcaagatcctcggccggttgaaattccgtacaagctacgggcagaacgtactgaaacattctatggaagttgcgtttttagccggtttaatggcttccgagcttggagaagatgcaaagcttgccaagcgggccggtcttctgcatgacatcggaaaagcaattgaccatgaagtggaaggaagccacgtggaaatcggagtggagcttgcgaccaaatataaagagcatccagtcgtcattaacagtattgcgtcacaccacggagacgaagagccgacttccattatcgccgttctggttgctgccgctgatgcactgtcagccgcaagaccgggcgcgagaagtgaaacgctcgaaaactatatccgcagacttgaaaagcttgaagaaatctccgagtcttacgaaggtgttgaaaaatcatttgcgattcaggccggccgtgaagttcgcatcatggtaaagccggactccattaatgatttagaagcccatcgtttggcacgtgatatccgtaaacgaattgaggacgagcttgattatccgggccacattaaagtgaccgtaatcagagaaactcgagccgtagagtatgcaaaataaagtgatgcttagcgcatcactttatttttttgagtccctgaaaaggaaggaatggaatgtatgagaattttatttatcggagatgttgtcggttccccgggccgcgacatggtaaaagaatatgtcccgaaactgaaagcgaaacataaaccgcattttacaattattaacggagaaaatgcagcacacggaaaaggactgacagaaaagatctaccacagcctgatggaagcgggagcagatgccattacaatgggaaaccatacgtgggataaaagagagatcttcgactttattgatgatgtgccgcatcttgtccggccggcgaatttcccggaaggtacgccgggcaaaggcattacctatattaaatcgaacggaaaagagcttgccgtcattaatttacagggacggacgtttcttccgccgcttgatgatccgtttgctaaagcggatgaattaatagaagaagcgaaaaagcgcacgccgtacatttttattgattttcacgccgaagcgacaagcgaaaaaattgcaatcggctggtacacagacggaagagcctctgccgtggtaggcacccatacacacgtgcaaacggcagataaccgcattttgccgaaaggaacggcatatattactgatgtaggcatgacgggtccgtacgacggaattctcggtatggacagagaaacggtcatcaagcggtttaaaaccaatcttcccgtccggtttacggtggcggaaggtaaaactacgctgagcggagtgctcattgacatcgacgatcaaacgaaaaaggccgtaaatatcgaacggatattaatcaatgatgaccatatgttctttgaataggtgatcatgtgtttattttataaaaatattaaaaggaaaagcaggaatatagcaacttcttagtgaatatagtagaaatggaaggtagcccgctatttttgaaaagcattgtggggatggctttttggatagcaacatctaataatgattgttctaatgaacactcacttatccattgtaaaactaagggggagcagaaatggaaatcttgaaagtttcagcaaaatcaagtccaaattcagtagcaggcgcgcttgccggtgtattgagggaacgcggagccgccgaaattcaagcaattggggcgggtgccttaaatcaggctgttaaagcggttgcgattgccagaggctttgtcgcgccaagcggcgtagatttgatttgtattccggcttttacagatatacagattgacggagaagaaagaacggcgattaagttaatcgtcgaaccccgttaaaaacaaaaacatgacattctcaacctgcttgcgtaaggcgagcgggttgtttttattgttgtcatattttctcacaatattatattgatagtacgaagagatgataaatggctttattcatataatattcaaaaaaaatcccgcccatttttccggacggaagcagttgttttctcggagtggacactggtgtttacctcctttttatatcatgttacaatccagttattacagtgttttttcgaggaggagtgtacatgttgggaggaaagatgaaagctatcgtcaaaaatgaaaacgctttcggagcaactctgaaagaaattcccataccttccattaatgagaatgaagttctcattaaagtacaggccgcatctatatgcggtacagatgtgcatatttataattgggatcaatgggcgcagaaacgaatcaaaacacctcaagtattcggacatgaattcagcggtatcgtagcggaaacgggcaagcacgtcacaaatgtcaaaacaggtgactacgtttcggctgaaacccacttcgtctgcggtacttgtgtcccttgtttaacaggaaaacatcatgtgtgcacccatacaaagatcctcggcgtagatacagccggttccttcgctgaatatgtcaaagtgccggctcgaaatgtttggaaaaatcccgctgatatggaccccgccgtcgcttctgttcaagagccgcttggcaacgcggtgcatacggtgctggaaagcagccagcttgcgggcggttccgctgcaattatcggctgcggaccgatcgggctgatggcggtggcagtggctaaagcggccggtgcatcccgtattgcggccattgataaaaatgattacaggctggctcttgcgaagaaattgggagccacgatcaccatttcagctgataaggaagatccgcttgaggtgatcgacaccttaacaggcggagaagggatcgaccttgtctgcgaaatgtcaggccacccggcagctatcgcacaaggattaaagatggcggccaacgggggaaggttccatatgctgagtctgccggaacgtccggtgacggttgacctgacaaatgacgtggtgtttaaaggacttaccgtccaaggcatcacaggcagaaaaatgtttgaaacatggcggcaggtatcgcacctgcttgaatccggccttgttgatctgacgccggtgatcacgcatcagtttccgcttgaagactttgaaaaagggtttgacctgatgagaaagggccagtgcggcaaagtcattttgattccataaggggagggttctataatgaaagaatttgaatttctaaaagcagagcttgataaaatgaaagaaaataaaacgtggcagcaaatgaaacaaattgaaacgaagcagggtccgtcggtggaagtcaaaggggaaaacgtgatacagctttcatcgaacaattatctcggtttgacgtcgcatccaaggcttgtcgaagcggccaaacgcgccgcggaagaattcggagcgggtacggggtccgtccggacaatcgccggaacattcacaatgcacaatgagctggagaaaaaattggcaaactttaaaaaaacagaagcggcacttgtttttcaatcggggttcacaacgaatcagggcgtcttatcaagcattcttacaaaagaagatatcgtgatctctgacgaactgaaccatgcttccattattgacgggatcaggctgacgaaagcagataaaaaggtgtaccgccatgttgatatggacgatttggaaagagtgctgaaaaaatcaatgaattaccgcatgcgcctgatcgtcaccgacggcgtattctcaatggacggcaacatcgctcctttgcctgacatcgtcaaacttgcagaggcgtacgatgcctttgtgatggtcgacgacgcgcatgcttccggcgtactcggaaaaaacggaaggggaacggttaatcacttcggtcttgacggaagagtccatatacaggtgggcacattaagcaaagccatcggagtgcttggcggttacgccgcagggtcgcaggttctgatcgattacctgcgccataaagggcgtcctttcttattcagcacttctcatccgcctgcggtaacagccgcatgcatagaagccattgacgtcctgctggaagagcctgagcatatggaaaagctatgggagaacacggcgtatttcaaagacaaactggttcaaatggggctgaccctcacaaaaagcgaaacaccgatcgtgccgatattaataggggaggaagaaaaagcccaggcattatcagaccttttattgacccgcggcgtctttgcacaaagcatcgtgtatccgacggtcgcccaaggaaaagcgagaatccgcaccattattacggcggagcatacaaatgaggagcttgaccgggccttggaagttatccgttcagccgcaaaagagctgcagcttgtgtaagggggaaatgattccctcttttttatttcttattgattcttattctcaataaggtgtacaataataggctggcggttgtgccaaacgcttttaaccagtatacttgagggtggaagtttcggttgaaaggagacattcgaacatgaatgaaaagcaaaagcaggaaagcggacaagtgaatccggcggacaaaacatccgaaaaggattacagcaagtattttgaagccgtatatattccgccttctttaaaagatgcgaaaaaacggggcaaagaatccgttcaatatcataacgattttaaaatctcagaagaatttaaaggcctcggtgaaggcaggaaattttatatccgcacgtacggatgccaaatgaacgagcatgatacggaagtcatggcgggtatttttatggcgctcggttatgaagcgacaaattcggttgatgacgcgaacgttattttattaaacacttgcgctatccgggaaaatgctgaaaacaaagtgttcggcgagctcggccatttaaaggcgctcaaaaaaaataacccggacctgattctcggcgtctgcggctgcatgtcacaggaagaatcagtcgtaaaccgcatccttaagaagcacccgtttgtcgatatgattttcggcacgcacaacattcaccgtctgccggaactgttatcagaggcatatttatcaaaagagatggtcattgaagtgtggtcgaaggaaggggatgtcattgaaaaccttccgaaagtccgcaacggaaaaattaaaggctgggtcaacattatgtacggctgtgacaagttctgcacatactgcatcgtaccgtatacccgcggaaaagaacgaagccgccgtcctgaggaaattatccaggaagtcagaagacttgcaagtgaaggctataaagaaatcacactgctcggtcaaaacgtgaatgcgtacggaaaagattttgaggatatgacgtacggactcggtgatttaatggacgaactgcgcaaaattgatattccgagaatccgattcacgacgagtcatccgcgtgactttgatgatcatctgatcgaagtgctcgccaaaggcggcaaccttcttgaccatatccatcttccggttcaatcaggaagctcagcgatgttaaaaatgatggcgcgcaaatatgacagagaacgctatctggagcttgtcggaaaaattaaagcggcgatgccgaacgcttcactgacgaccgatattattgtcggttttccgaatgaaaccgatgaacaatttgaagaaacgctttcgttatatcgcgaagtggaatttgacagcgcatatacgtttatttactctcctcgtgaaggcacgccggcagcgaagatgaaagacaatgttccgatgagggtcaagaaagaacgtcttcagcgcctcaatgatttggtgaaagaaatttcagccaaaaaaatgaaggaatatgaaggcaggactgtcgaagtattagttgagggagaaagcaaaaataaccctgacattcttgccggctatacggaaaaaagcaagctcgtcaacttcaaagggccgaaagacgccatcggcaagattgtacgcgtcaaaatcgaacaggcgaaaacatggtcgcttgacggtgtgatggcaggagaagcaatcgaggtgaaataataatgacgctttactcaaagaaagacattgtacagcaggctaggaaccttgcgaaaatgatttctgaaacagaagaagttgattttttcaaacgcgccgaggcgcagattaacgaaaatgaaaaagtctctgcaattattaatcagattaaaaccctgcaaaagcaagccgttaacctgaagcactacgaaaagcttgaagcgctgaaacaagtggaaagtaaaattgacgccctgcaggaagagcttgaagggattccgatcattcaggaattcagagattcccagattgaggtcaatgaccttcttcagcttgtcgcacatacgatctcaaatcaggtgacaaacgaaatcattacatctaccggaggcaacctgctgacgggagaaaccggttcaaaagtaaaacattcgaataacagctgttctatttaaacacggggccttcatcggcccgtgtttttttgcttttgagaactaattgtaatatgtactaaattttcattaactcaccgttttgtcccattttactggaaagttttatcatacttaaaagtaaagtttctgggcagggctgcatacaatgaaacagaaactttgtatttttatatttttattataaaaatgcacatgagacaaatgcccagcataagataacacgaagaagaacaaggaggcctgccggaatgtctgaatacagggaaattattacgaaagcggtagttgcgaaaggaagaaaattcacccaatgcaccaacacgatctcacctggagaaaaaccgtcaagtatattgggcggctggattatcaaccacaagtacgatgccgaaaagatcgggaagactgtagaaattgaagggtattatgatataaacgtctggtactcttacgccgataatacaaaaacggaagttgtaaccgagagagtaaagtatgtcgatgtgattaaactcagatacagagacacaaattacttagatgacgaacacgaagtcattgccaaagtgctgcagcagccgaattgtcttgaagtcaccatttctcctaacggaaataaaatcgtggttcaggcagagagagaatttttagcagaagtggtcggtgaaacgaaagtcgtcgtcgaagtcaatcctgactgggaagaagacgatgatgatgattgggaagacgatcttgatgaagaattagaggacattaaccctgaatttttagtcggagatcctgaagaataagttgaggctaggggagtttaacaccccaagtctcttttttatatataaagatatcactcttttgtttatgttataatgggattcggataagagaagatacatagtgagggattaaatgatggctagttacacgcctatgatacagcaatacttgaagataaaggcagagcaccaagatgcctttttattttttcggcttggtgacttttatgaaatgttttttgaagatgcaaaaaaagcgtcacaagagcttgaaattacactgacaagcagagacggaggttcggctgataaaattccgatgtgcggcgtgccgtatcattccgcggcggcttatattgaacagctgattaaaaagggctataaagtggcgatctgtgagcagacggaagatccgaaggcggctaaaggcgttgtaaaaagagaagtcgtccagctgatcacaccgggaaccgtgatggatggaaaaggcattcatgaatcggaaaacaactttatcgcttccgtttccgaattccgtgacggatacggtctcgctttatcggacttaacgaccggagaaaacctggccgtatttattgagcggattgaagatgtcatgtcagaaatttactcagtcggcgcaaaggaaattgtcgtatcaagcaagtttaacgaacatacagctgctcagctgaaagaacggtgcggcgccacgatttccatcgaagacggggaaataacagaacgcattgaaatcgcaaatcacttgccgggcgaagagctgacagagacgtttatgcgtttatatacgtatttgcagaaaacgcaaaaacggagcctggatcatctgcagccggttcaagtatatgaattggaagaagcgatgaaaattgacctgtattcaaaacggaatcttgagctgacggaaacgatccgttcgaaaagcaaaaaagggtcattgctttggcttttagacgagacgaaaacagcgatgggcggccggcttctcaaacaatggattgaccgcccgctgatcagggcatcccaaatcgaggaacgccaggaaatggtcgagacgctgatcaatcatctgtttgagcgtgaagatctgcgagagcgcctgaaggaagtatacgatttagaacgtctggcgggccgggtcgcattcggaaacgtcaacgcaagggatttaatccagctgaaagaatctttaaaacaagtgccgagcatcaaagagcttgtagggtctcttaaccataaaaaagcaaaagaacgcgccggcttgattgatccgtgcggagatttgcttgacctgttagaagaagcccttcatgaaaacccgccgttatcgttaaaagaaggcaatttaattaaagacggctatcatcagaagctcgatgagtaccgtgacgccagcaaaaacggtaaagactggattgccagactggagcagcaggaacgcgcttatacgggcatccgttcattaaaggtcggtttcaataaagtgttcggctattatattgaagtcacaaaagcaaaccttcatctgcttgaagacggacggtatgagcggaagcagaccctcacaaacgccgaacggtacattacgccggaattgaaggaaaaagaagcgcttattttagaagcggaaaacaacatctgcgagctggaatatgagctttttgccggactgcgtgaaaaggtgaaacaatttattccgcgcttgcagcgtcttgccaaacaaatgagtgagctggacgcactgcaatgctttgctacgatcagtgaaaacaggcattacacaaagcccgtcttttctgataatgaagtaaaagtcattgaagggagacaccccgtcgttgaaaaggtgatggacagtcaagaatacgtcccgaacaactgcctgatgggcgattcgcgggaaatgctcctgattacaggtccgaatatgtcaggtaaaagcacgtacatgagacagatcgcacttctatcgatcatggcccagatcggctgctttgtgcccgcaaaagaagcggttctgccgatttttgatcaaatcttcacgagaatcggggcagcggatgatttgatttccggacaaagcacctttatggtggaaatgcttgaagcgaaaaacgcgattgtgaacgccacaaaagacagcctgatcctgtttgatgaaatcggccgcgggacatcaacgtacgacggaatggcgctggcacaggcgattattgagtatgtccatgatcatatcggcgctaaaacactgttcagcacgcattatcatgagctgacggtgcttgaagataagcttcctcagctgaaaaacgttcatgtgcgcgcagaggaatataacggaacggtcgtgtttctccatcaaatcaaagaaggagccgcagataaaagttacggcattcatgtcgcccagcttgccgagctcccggacgatctgatcagccgcgcgcaggagattttgaaacagcttgagcagacgggagataagccggagcttccggcggtatctgagaaaaagtccgccgtcagagaagaaccggcacagctgtccttttttgctgacggtgaaaaagaacagaaggcaccggctgtttctaataaagaaaaacaagtgcttgaagcctttaagtcaatcaatattctcgatatgacgccgcttgaagcgttgaacgaaatgtacaagctgcaaaaaaaattaaaatagaaagaggtgacggacttggcaaaagtcatccagctgtcagatgaactttcaaataaaatagcggccggcgaggtggtcgaacggcctgcctcagtcgttaaagaattggtggaaaacgccatcgacgcaaacagcacagtcattgaaatcgacatagaggaagcggggctttcgtcgattcgggtgctcgataacggcgaagggatggaaaccgatgattgcaagcgggctttccgccgccacgcgaccagtaaaatcaaagatgaaaacgacctgttccgggtgagaacactcggtttccgcggagaagctttgccaagtatcgcgtctgtttctcatctggaaatcaaaacgagcatcggcgagggagcgggaacccatctcattcttcagggcgggaatatcatttctgagcagaaatcctccagcagaaaaggaacggagattatcgttaccaacctgtttttcaatacacccgccagattgaaatatatgaaaaccgtgcatacggagctcggcaatattacggatgttgtcaaccggatcgctcttgcgcatccggaagtatcgatccgtctccgccatcaggggaaaaatctgctgcagacaaacggtaacggggatgtgcgccatgtgctggccgcaatttacgggacggcggttgcgaaaaaaatgataccgctccatgtcagctcgcttgattttgaagtcaagggctacattgcgcttccggaaatcacgcgtgcatccagaaactacatgtcatctgtcattaacggaagatacattaagaatttcccgcttgtaaaagcggtgcatgagggctatcacacacttctgccgatcggccgccatccgattacgtttatcgaaattacgatggacccgattttggttgatgtcaatgtccatccgtcgaagcttgaagtccgcctcagcaaagagacggagctgcatgagctgatccgtgacgggataaaggaagtgtttcaaaagcagcggcttattccgagcgcccagctcccgaaaaaatcagcgccggcgccggccaaaaacgaacagcaatttatgacattcgaggaaagcgcgcctgagcggaaacttcctgaaaaaacgccggagccgtcttactcaccaatgaagctgagttcggtcgtaaaagagcctgagccggtaataatagaagaagagatcctcccgaatgaagcggatcacgatgtgccgccgaagatcggtatgcccgaaacggcagcgcctgtttccgatactccggaaccggaagctgtctctgaagaaatacgggaagaaagagttccggtgatgtatccgatcggccaaatgcacgggacatatattttagcccaaaacgaaaacggcttgtatatcattgaccagcatgcggcccaagaacggattaaatacgaatatttccgggagaaagtcgggcaggtcgagcctgaagtgcaggatatgatcgtgccgctcacctttcattacgcggcaaatgaagcgctgattattgaccagcatcagcatgagcttgaaagcgtcggagtatttttagaagcattcggcacgaacagctacatcgtccgctgccatccggcctggtttccaaaaggggaagaagctgaactgattgaagaaatcattcagcaggtgcttgacgccaaacagatcgatattaaaaaactgcgggaggaagcggccattatgatgagctgcaaaggctcaatcaaagcgaaccgccatttgcgaaacgacgaaatcaaagcgctcttggacgacctgcgccgaacgacagacccgttcacatgcccgcacggccggccgatcattatccaccacagtacgtatgagatggagaagatgtttaagcgtgtgatgtaataacaacgtttatgtgagactaaaccgttatttgcctacaagcagccttactagtttgaatgacccagcctttcagagataacttttgagttttttaatttctggcataattggtgcatcggtatgccgtcaatcatgaaaatgatttgtttaacatccagctgcttttccgtcatataaaaattgtttttggagagtatttgggattggcgatgtagtatcctgtgtttggtgtaaccgtctatatcgtccattgactgcattaatagtgaaataattggagaaaacggttcctgaaaaatctcatgttatttgtgaagaatttaaataaaattggaatttggcgggttatactatccgcaagtcagtcaagggggactagtaattagcccccccttacatttagttcttcctgcggtattttctatttttgatcaaactgaaaaccactaagagaaccacaccgatagcaacaatataaaatgaaagttctgctgctgcggtattaatattcttaagaacaaggataagccctattaaaactataggaataatgtaagttagaatttttatagcttttgggctcggttcagcattacttttatgttccatagttacctccgatcttagcactttagaaaataatcactttaaagcttaacacaggataaatttgttaaacaccaacaatagccccgtttaaatgaaaagcctaagagttttagtaatccgccaagcggctgttgggttgccagttcttttagagcacccgcatagcacgcatcttccactgcaccagtaaaattgtcgatcgtattaagaattatttcaaaacgccgattctacccataggcagctttagcaggtattgcatcccagggcaatttaccttgagcagtaaactccgacccatataacatagtctatttgtctaatgtttaatattttatatttactttttacacttaatgattttatgttagttttgtttttgcacagtaaaaagctgcgcgacgctttcgtgaattgttgcagctagggctgatttgaaaagagtgtaaattacgccgtacttttctaagttcaattatgttaatgtcaacataacgttgaattcggtgtaagaactaaggtattctgatatatttcgagagcccgtatggtttagtttatcttgaagaaaaggattgaaataatagtcttgattgcgggtcatttctaaaaactgattatccccttcggccgcttcggcaattgcttttcaaaacaaaagctcaatttgttttctttttatccgaaactcatattcatccttcattttctgaataaaattccctaaagaattcatctaaattaatattctgatttacttatatatcagcatagcaatttgtaaaaaaggtccagactggtgcttttggcgggagcagaaagtttttttaactttaccggaaaatccatggaaaaacgtggtgtcatctggtaaagtggttacagtcggctgggcggcggcagcagtctgcccggatcttttaaatgggaatggtgacaatggatcatacatatgaagtgcatcaaatcaaaacttatcaccagatgtggtccaactattgttatattatcgcagaccgctcaaaaaaatctgcgatagcggtggacccgtcctgggaaatcgataaaataaccgataaactgcatgaattggatgttgatttatcagctattttattaacacattcgcattatgaccatgtaaacttggcgaagccgcttcagcaaatctatcattctgatatatacatgtcgtcggcggaaatcgatttctatcaattccggtgcagaaacttaatagcgcttgaagacggccaaacctttgcggccggagggtttatcatcagaagtatactgaccccgggacatacggccgggggaatgtgctatttgctatctgatcatctttttaccggtgacaccgtgtttacagaagggtgcggtatatgtggggacaggggcagctcagctgaagatatgtttcacagtatacagaggatcaaagcctccattccgccgcatgtgcgtgtgtatccggggcactccttcggggagaagccgggtcaaaaaatggagagtcttttgaaaaacaatatttactttcagattgaaaaaaaagaacattttgtgaatttccgcaacagaaaaaatcaaaaagggctgtttcattttaagtaatgtgtaatttagttctatctaactagcttttcttttgaggcaaggaacttctgaaatggaatggaagttattactagatttctggtgatgaatggctgagtaacgggagtttgcggaagagaacgccgggcaggccggatgggacattctgcttacgcctgttccgaaagccctgagtccgcctttcgacagggaaaaataggcattattcaggagttcgcataggataaattaacttgacatggtatttttgtgaagttactatcaacttgaacatgcttcttatctgaatccgagaaaggatggctgagaaaatgatcacatacttattccccggacaaggttctcaaaagcagggaatggggagctcattgtttgatgaatttaaagacttaacggagcaggctgatgaaacactcggatattctatgaaacggctttgtcttgagaatccgtattccaaccttcacaagacgcagttcacccagcctgctttatatgttgtaaacgcgttaagctatttgaaaaaaatccaagacaatgacataaagccggattatgtggccggccacagtttgggagaatataatgcgctgtttgcagcaggtgcttttgattttattaccggtctgcagcttgtccgtaaaagaggcgaattaatgagtatggccactgacggaaaaatggccgctgttatggggttaactgcagctcaagtgtcagacgcccttcaaacgcacggattacatacgattgatattgccaatatgaattctccttaccaagttgtcatatccggacgcaaagaagacattgaaagagccaaaagcgtattcgaaggattaaaagacgttacgatgtttcatccgttaaacgtaagcggcgcttttcactcgagatatatgagtgaagcaaaacaagagttcgaaaaatttttacagtcatttcatttttctgctatatcaattcctgtcatttctaatgttcatgccagaccttatgagcaagacggaatccactccgttctggccgatcagatcgaccattcagtgcgatggaacgacagcatccgctatctgctggacaaagggcggatggaatttgaagaagtcggcccaggccatgtgctgacaggacttattcaccgcatcaaaaaagaaactgaagcttcacccgccatgtagcggaatgcaagtcaaaattcttatctcacacaatagtgccagccatacaacatcacgaccacttcacctgcacacgacatcacgaaaaactcacaaatcaatattttgaaaaaataaagagcaaaaaggagaacaaatgaaccagccaattgttttcatgttttctggacagggttcccaatactatcaaatggggaaagagctgtttgcacataacgccgcttttcggcagaaaatgcttgacttggacgattttgcagtcagccgtttcggttactctgtccttaaagagatgtatcatacaggcaatcgtctgtctgatccatttgaccgccttcttttcagccatcctgccatttttatggctgagtacgcacttgcatatgctttggagcaaagaggcatacgtcccgattatgtgatcggagcaagcctcggagagtatgcagcggccgctgtgtcgggggtgctgagcgccgaggatgctttagattgcgtgctggaacaggcccgaatcgttacggaaacttgccgtaacggcagcatgcttgcgatactgggtgatccggctttatatcaagatgatccgctgctcggcgaacatagtgaattggcatctgtaaactatcattctcactttgtcatctcgggagagcgggaacatatcaaaaagatcatggacgatctgagagaaaagcagattcctcatcagctattgccggtatcttacgggtttcactcagcgctggttgatcaggcggaacagccgtacaagcgctttttagctcagaaatcaatccggactccgtttataccgtacatctccagtgcgaccggaggggctgagaccgatatacaagcggactttttctgggatatcgtaagaaagccgattcgattccgcgaagcgcttcaattcgcagacagccgccaaaaaggattgtatattgatgccgggccttccggaacattggccgcatttgccaaacagattcttcctgcaggatcggctgaacgcatccgtgccattatgacgccgtttcataaagaacaaacacatttgcagcaaatagaagacagcattttatcaccgcccggaaggagactgtaagatgatcagctttgtttttccaggccaaggctcgcaaagaatagggatgggggaggacctgttcggccgctatcctgaattaaccgcaaaggccgatcacattctcggatattccattcaggagctgtgccgggacggagaacgtctcaatcagactcaattcactcagccggcgctctatgtcgtcaatgccctcagttatttgaaaaaaacagaagaaaccggcttgaaaccggattttaccgctggacacagtttgggcgaatataacgcgttatacgcttcgggcgcctttgattttgaagaaggcttacagttggtcaaaaaaaggggcgaactgatgagccgcgccaaaggaggcggcatggcagcggtgatcggcctgactcatgagcaggtgacggatgttttaagagaaaatcacttggatatgattgatatcgccaacatgaacacaccgcagcaaattgtcatttccggatataaagaagatattgaaaaagcagcatccgtttttgaagccgtaaacggcgtaaaaatggttcaccgcttaaatgtcagcggcgcctttcactccagatacatgctggaagcgaaggaagagttttcacggtttattgaatctttccattttaagccgctgtccatcccggtcatttcaaatgtgacggcaagaccctatgagcagagagagctgaaagagacactcgccggacaaataacgggatcggtgaactggacagacagcatccgttacttaatgggaagaaagaacatgagctttgaggaaatcggtcccggaaaagtgctgacggggctgatacaaagaattacggctgaagcggagccgataacagatgaaatcaaagtcccggctgaggctggaaaaagctcaattacggcagcgtctttaggaaatgaagagtttaagcgcgattatcaattgaaatacgcctacttggccggcggcatgtaccgcggaatttcttcgaaggaaatggttgtcaaactggctgaaaaaggaatgatgggctttttcggaacgggcggtttgaacatcgcgcacgttgaggacgccattttgtcaattcagcatgagcttcgtgacggcggttccttcggcataaatgttgtacataatatgaagcatacagattcagaagaaaaaatgattgatcttttactgaagcatgggattcagaacttggaagcatcagcgtttttaacggttactcccgctttagtaaggtttcgcgctaaggggttaaaacgcggtgccggcggacaaataatagcgcgtcagcggattatcgccaagctgtcccgtccggaagtagcggaagcgtttctcagcccggcgcctgatcacattctgcagaaacttgcagccgaaaacaaaattaccgctgaagaagcaagtctgatgagagaaatacccgttgcgcatgacatctgcgtagaggctgattcaggcggccacactgacggcggagttgcttacagtctcatgccggcgatcatccgtttacgagatgacatgatgaaaaaataccgatacggcaaaaccgtccgcatcggagccgcagggggaatcggaacgcccgaggctgccatggctgcatttatgctcggcgctgattttattgtgaccggatctattaaccaatgcaccgttgaggcagcgacgagcggcctcgtaaaggacctcctgcagcagatgaatgtgcaggacacggcctacgcgccggccggcgatatgtttgaatcaggcagcaaggtgcaggtattaaagaaagggctgttctttccgacccgcgcctctaagctgcatgaactgtatcagcgtcaccgctcaattgaagaaattgatgaaaagacactcagacaaatagaagagaagtattttaaggcaagtgtaagcagtatttatgacaaagtgaaggctcattattcgaatgaagacatttcaaaagccgaacggaatccgaaacagaaaatggcgctcatattcaaatggtatttcaggcaaagttctgcttcggcgattaaaggagacccggatgccaaggtagacttccagattcattgcggcccggcattaggcgcctttaatcaatgggtgaaaggtacggagctggagtcctggaaaaaccgccatgccgatggtatcggcatgcggcttatggaagagacggccacgcttttgaatcagaagttaggttcatttttgcaaacgtgttgacaagacgaaatgatagattgaaaacatggaatattcataaaagatgaaacagggaggaactgacaatgagtaaagaaagaatctttgaattgctgcagaacacaatctacgaggttttacctgatttagaaggcgaacagctttcacaggaagaccggttagttgatctgggggcggattcagtggaccgcgccgaaattatcacgatgatgcttgaagaattatcactgcagatcccgcgtgttgagctgacgggagtgtcaaacatcggcgaattggcggaaaagctttatgaaaaggtacaggctgtctgataaaacggtggaaaaatcggaaactcaaaattcatattggaggcgaagttcatggcggctgccggaatagaagcgataaatgtgtttggcgggacagcataccttgatgtcatgcagctggcggagtacagaaacttagaccctgccagatttgagaatttactgatgaaagaaaaagcggtggcgcttccgtacgaagaccctgttacattcggcgttaacgcggcaaagccgattatcgaccgattgacagaggctgaaaaagacagaatcgagctgctgattacctgctcggagtccggcattgacttcggaaaatcactcagtacatatattcatgattacttaggcctcaaccggaactgccgtttatttgaactgaaacaagcctgttattcaggaacggcgggtttgcagatggcgcttaactttattttgtcgcagacatcccccggagcgaaggcgcttgtcgtcgcgacggatatttcccggtttttaattgccgaaggcggcgatgcgttaagcgaggattggtcttacgcagaaccgagcgccggagcgggtgccgtcgccttattgatcggtgaaaatccaattgtatttcaggcggatgcgggcgctaacggctactacggctatgaggtgatggatacatgccgtccgatcccggacagtgaagccggtgacgccgatttgtcattgatgtcttacctcgattgctgtgaacagacatttcgcgagtacaaaaaccgtgtgccgggcgctgactacaaagagacgtttcactatcttgccttccatacaccgtttggcggcatggtcaaaggggcccaccggacgatgatgcgcaagcttgcaaaagcgaaaaacgctgaaatcgaacaggattttcaaaccagagtagagccggggctccgctattgccaaagagtcggaaatattatgggagcagcctctttactggctcttgcaagcacgattgaccaagggggattcgacacttctaagcggatcggctgtttttcctacggctccggatgctgttcagaattttacagcggcgttgtgacgcctgaagggcaagcgcggcagcattctttcaatatagaagagcatctgaacaacagatacaggctgtccatggaagagtatgaagaactgtttaaaggcagcggtctggtgaagttcggaacccggaatgtcaaattggatattaatatgattccgaacattttagaccatcatgccgggagccctcgtttatatttggaagaaatcacggaatttcatcggaaatacaggtggatatcgtgacctatgaaacgataaacgtccgttttcagcaaaatgtctgcttcatcacctttgatcggcctgaagccaacaatacgattaatgagcgtttagtggaggaatgcctgcatattctttctgaatgtgaagactccgtgacctccgtagtgcttgaagggcagccggaggtattttgtttcggggcggattttgatgagatgtaccggaaaatgaggcagggaatgcagcatgcggaatcgcaggagccgctttaccgtttgtggctggcattaaaatccgggccgtacatcacaatcgcccgcgtccgcggacaagtaaatgcgggaggtgtcggttttgccgccgcgtgcgatatcgtcattgcagaggagaatgcttcgttcagtttatctgaactgttattcggactttatccggcctgcgttctgccgtttttaattcaaagaatcggatttcaaaaggcgcattatatgacgattatgacaaagcccgtgccggcacgccaggcgcttgaatggggactttgtgacgtatgcgtcccggactcagcaacagagctgagaaagcatttgctgcgtcttcgccctctgtcgaaaaaagcagtcatccgctataaacaatacatggattccttaaacgaccttgttcatcgttcgaaatccattgctctagccgaaaatcaagcgatgttttcagatccggataaccaatcagccatcttccgttatgcagaaacggggcggcttccttgggaaacggagaacagttaggaggatatcatgccgaacgccgcagttgaactgctcgaaattgaaccggatattatccaagtgacaatgcaggataaagcccataaaaacgccttctccaaagaactgacggatggattgatggaagcattcacccgtataaaaaaatcgtcagtctataaagctgtgattttaacaggatacggccattactttgcttccggaggcacacaggaaggcctgctcaggattcagcagggcatcacgaagtttacggaagaccgcatgtactctttggcgctggaatgtgatattcccgtcatttccgccatgcagggccacggaatcggaggcgggtttgtcatggggcttttcagtgattttgtcattttaagcaaagaaagcgtgtataccgcaaactttatgaaatacggtttcacccccggaatgggcgctacctttatcgttccggagaagcttggggcaagcctcggccatgaaatgctgttaaacggcggccactaccgcggcggtgacctggagaaaagaggggtgccttttccggtgcttcctcggcaggaagtactagactatgcgcaggaattggcccgtgagcttgcggaaaaaccgagaaactctttaattacattgaaaaggcacttggtgacgccgtttcgcgagcagcttccggccgtcattgagaaggagttaatcatgcacgatgagacgtttcatgatgatgaagtgaaaaaacgaatcacgacgatgtacggagtataagacatacatcttacatacagatgaaatggaggcagctctatgaaaagtgatatgaaggcaagcgggttactcaagccatctgtcagctatggaaaatcattgcggctttcagcggatcagccgatgacgattcctgaagtcctgcacaaaaccgccgcggcagcgggagatcaaaagggcatcacatatatacagcctgacggcaccaaagtgtaccagacttacagcggcctgaaaaagatcgctctttcgattgtgaaagggctccgccaatcaggagtgaaggctcaggatgaagtcatattacagctcagtgacaattcccagctgattcctgctttttggggctgtgtttttttaggagcgatcccggttccgcttgcggccgctccggcttatacagaaatgaacagcgggacgcaaaaactgaaagacgcctggacgcttttgaatcggccgtatgtcatcacaagccgtgacgtgctgccggagatgactgaatgggcggaggagcaggagctttccgggttttgcgctttggcggcagaagatctcagtgcgcacgaaatggatacggactgtcatcatccccgtcccgaagatttggcgatgctgcttttgacctcgggaagcacgggcacgccgaaagccgtgatgctcagccatgaaaacatcgtctgcatggtcaaaggaaatattcagatgcagggctatacaagtgaggatgtcacgtttaactggatgccttttgaccatgtcggcggcatcggaatgcttcatctgcgtgatgtttatctcggatgtgaggaaatcaacataccgagcgaatccattttgatggaccctttaaaatggctcgatctgattgatcattaccgcgcttcggtcacgtgggcccccaattttgcctttgggctgcttgccgattttgcagaagagattcaaacgcggaaatgggacttatcttccatgcgttacatgctgaacggcggggaggccgcggttgcgaaagtcggacgcagaattatggagcttttagagccgcacggtctgccggctaatgccatccgacccgcatggggaatgtccgaaacgtcttcaggcgttattttctcagatgagtttacactggaaaacacgaatgacgacgatcgtttcgtcgagatcggtctgccgatcccgggatttaatatgagaattacggatgaccgcaatcaagtggtggaagaaggagaaatcggccgcttccaagtgtcgggtctgactgtaacgagcggatattatgagcgcccggacttaaatgagagtgtctttacagaagacggctggtttgaaacgggagatctcggatttctgcgtgaaggccgcctgacgataacggggcgcacaaaagatgccatcattatcaacggtgtgaattattacagccatgccattgaatcagccgttgaggaattgccggaaattgaaacgtcatatacagcggcatgcgccgtccggccgaatcaaagcacgacagatgagctggcgattttctttgtgacatctgttccgttggatgagaaccgcatgacgaagcttcttcatcacattcaccagcacgtgacacagagaatcggcgttacccctgattatctgcttccggtcgcaaaagaagacattcctaagacggcgatcgggaaaatccagcgcactcagctgaaacattcatttgaacaagggcaatttgattcattacataataacagacaagaaggcggcaattcagacacggcttctgcagagaaagaaattgaacgggattttatccgttttctgaaagaggaactttccatcgcggatgagctcgttgatccaaatacaccgtttcaaagtcttggcgtcaattccatcaagatgatgaaactcgccagatcaattgaaaaaacgtatcacatccggctgacggcaagagagctgcacaaaaacccgacgattggcgctttagcggcttatactgctgaaaaagcggcaaacatgtcagcggaccatcatccccaaaaagccgaaccgccggcagaacgggagagacggcaaacggcaccagcgctttcagaagtccaaaaagggctgtggacattgcagaaaatgtcgcctgaaacgactgcataccatgtcccgctctgtttccgattcacatccggaatcgacaaagagaaactgaaacaggcgtttcagctcgtattaaagcagcatccgatgctcaaaagcgccgtgaatgaaacagaaggcgggttttatttcatagaagcggcagatccttttgtattctcggaagaagatatttctgacgtcaatgaatcacaaatatccgctctgatacggaaaaaagtgaaagagccgtttgtcaaagaaggcggacctttactgcgcgtgcagctgctttcaaaatccgccgaggaacattatcttttgacggtcattcaccacatcgtgtttgacggcatttcatccattacatttattcacagtctgctggaacattatcaggcgctgctggagggaaaagaagagtttacggctgccgctcccggtattcatcccgatttcgcggcttgggaaaagcggtatttagcgggtgacgaaagcaaagctgcccgcgcttactggatgaaacagctcgagggcgatctgcctgatcttcagcttccgccgatgcgcacggacagcagtgttccggagtttacagaagatacgctgacacgccgtcttcccgaacggctgctgaataatataacggcgtttgccgcatcccgttcgattcatttgtctaccgtcatgctgagctgctatatggtgcttttaagcaaatatacggataaggaagatattgtgacaggcatgcctgcaatggtcagacccgaagaacgctttgacggagtggtcggccatttcctcaacatgcttcccatacggagcagagccggacgaaaagaaacatttgctgactttgttcaaaaggtgcaggatgccgttctggacggactggatcactccttttatccgtttccgaaaatggtgcgtgatgtgcatgcgaaacccctgcagaacggttcgcctgttttcagcaatgcctttttctatcagaactttctgcagcattcaagctatcaatcgatgcttgatgaatacaaggaattctcctgtgagtttgtaaaagacattcatcaggagggggaatatgatcttgtatttgaaatgtgggaagaagcatcaggcatggatcttacgattaaatacagcaccgaattattcgacgaagcaggggcggccagacttttcagccaatttgtacaagctgctgaagctttgacggcgaatccggatatgccgcttgagaacgtttctctcatgacaaaaagagaggagcacatgattcttaagacttggaatgaaacaagccgtgaatatccgaatgcctgcttccatgaattattcgaacgtcaggcggcagaaacgccggacgcttgtgcggtcgtgtatgaacagcaacagctgacgtaccgtgagcttgatgaaaaaagcacgaagctggcgctctatttgcaggcgcacggtgcaggccctgatgatctcatcggcatttatacagaccgttcattgcatatggctgtcggacttctcggcattttaaaagccggaggagcgtatgtgccgcttgatccttcttatcccgctgacagattggaatatatgatcgccgacagcaggatttcaatgtgcctgacgacagctgatttagagcactctttgaactggggaggcgtgcagacaactgccattgaccgcgagtggtctcatattgaaagtacagccgcggaaagaacgtcgctgaagcggttagtgacacctgacgatctggcgtatgtcatttacacgtcgggcagcacgggcaaaccgaaaggcgtcatgattccgcaccgggcgctgaccaatttcttaatctcgatggcgaatgaaccggggctttcgtccgaagacaaactgcttgccgtcacgacatattgctttgacatcgcggcactggagctttaccttcctttaatcaaaggagcggagtgcaacatctgtaagacagaagtcacaaaagacgcacggaagctgaaagagctgattcaagagtacaaaccgacgatcatgcaggcgacgccgtttacgtggaaaatgctctttcattccggatggtcaaatgaagaaaatgtgaaaatcctttgcggcggtgaggcccttagcgaamaattgaagcagcagtttctcgatacgaaaagtgaggcttggaatatgttcgggccgacagagacgacaatctggtccgcggtgcagcggataacgaaaaatgagagcgcgcttacgatcgggcgcccgatcgccaatacccgcgtgtatattatggattccggtctcaaccctgttttagaaggggtgccgggagaactttgtattgcgggagacggattggcaagagggtatttcaacaagcctgagctgacagataaagctttcgtcagccatcggctcgaactgggatcaaagctttataaaacaggcgatatggcgcgttttcttcccggcggccgcattgaatacatgggacggatggatacccaagtcaaaatccgcggctaccggattgaacccggagatattgagagcaggctgaatgcccatccggccgtacaggaaagtgtagttgttgtgaacaatcactccggaaatgagaagctttgcgcgttttatatccggaaaaacggagagccgcttccgtctgcaaaggaattgcgcaatcatatgaaacaagcgctgccggcctatatggcgccagcttcgtttgtccgtcttgaagagctgccgcttacgccgaacggaaaagtggaccgcaagcttcttgctgcccgcgatctgacggaaaagcagccggacacacaaacattttcatcatctcatatccagcaggccgtactggcgatttggcaggatgtattgaaaagcaaagatatagagcttgatgaccgcttttttgatgcggggggagattcgcttcttgccgtgactgtcactgaccggatgacgcaggaactggattgtgaattcagtgtaacggagctgtttgaatacgcgacggtaaaagacatcagccggtatatcgctgagcaaaaaccgaaagaagccgttttggctcctgtaccgcaaaagaaagtgaatgcagaagaccgggaacatccggcggaagaatttcccgattattacgaggacagccttgcggttatcggtatatcctgtgagtttccgggagcgaaagatcattatgaattttggaataacatcaaagaaggcaaagaaagcatcaccttcttttcaaaagaggagctccgccgattcggtatttctgaagaactggctgatcatcccggcttcgttccggctaaatcagttttagaggggaaagaaatgtttgatcccggtttcttcggcttttcaccgaaagatgcggaatatatggatcctcagctgagaatgcttttgctccattcatggaaggcaatcgaggatgcgggatatatctccaaagaaattccggaaacaagcgtgtatatgtctgccagcacgaactcttaccgcagcctgctgccggaggagacgacagcacagctggaaacgccggatggctacgtgtcatgggtgcttgcccaaagcggtacgattccgacgatgatttctcataaactcgggttgaaagggccgagctattttgtccatgccaactgttcatcttcgttaatcggcctgcattcggcttttcaaagcctgcagtccggcgaagccaagtacgcccttgtcggcggtgcgacccttcatacggaatcaagcgccggatatgttcatcagccggggctgaatttttcgagcgacgggcatattaaagcgtttgacgcggatgctgacggaatgatcggcggtgaaggagccggcgccgtgctcttgaaaaaagcgtctgatgccgttaaggacggcgaccatatttatgcgctgctgcgcggaatcggcgtcaataacgacggagcggataaggtcggattttatgcgccgagcgtcaaaggacaggctgaggtcattcagaaggtcattgatcagacgggcatacatcccgaaacgatcgcgtacgtcgaagctcacggcacaggaacaaaactcggcgatccgatcgaactgtccgcacttcaatcggtgtacggccgatatacagataaaaaacaatactgcggcatcggttcagtcaaaacaaatcttgggcatttggatacagcggcaggaatggcgggctgcatcaaggttgtcatgagcttatatcatcaggaaatcgcgccgagcatcaattacaaagagccgaacccgaatcttcatttagaagactctccgttttacgtagcggaagaaaagaaagagttaacccgtgagaacagagcgcaccgcatggctttaagctctttcggtcttggcggaacaaacacacacgcgatttttgaacaatatccggatgcatctaaagcagcagacgctgccggtccgttcatcattccgttgtctgccagaaaaaaagatcgtctgaaggagtacgcaaaacagctgctggcttttctggaaagaaaaacggacacagacctcgctgatcttgcctacacgttccaagtcggaagggaagcgatggaagagcgcgcggcctttatcacaagcggcactgcggagctgaagcggcagcttgccgattttatcaatgataagccggctgtaacaggctgcttcagaggagaaaaacagcaggcgaaagatattgcctggctttctgatgatgatgacagcgctgaactcattgagaaatggcttgcgaaaggaaaaggaccgaagctctgtgaaatgtggagtaaaggcgtcgccattaattggcacaagctttacaaagacaagcatccgaaacgaatcagcgtgccggtctacccgtttgcaaaggagccgtactggccgaaaaaagcagaaaagaacacatctgccgcacacaccggagtctcagttttacacccgctcgtgcagcaaaacacgtcggatttggccgttcagcggttcagctcacggtttacaggctcagaatttttcctgaaggatcatgtggtcagggaaaaagcggtgctgccgggagcggcatatttggaaatgtcttatgaagcggtaaaacgggcgcttggcggcttattaaaagaccaagacagaataacgctccatcatacggtctggatgaaaccgatcgtcgttcacgaacaagagcgccaagtccatattgcgctgttccctgaagaggacggcatcatctcatatgacatttacagcgtcaacgctgacggcgaagaagtgctgcacagccaagggcgtgccgagatcataaaggctgaacgagagcctgaggccgacctttctgccatacaaaacaggtgcaaagcggacattcttgatccggcggccttttatcgggaaggccggagcagggggatgttccacggaaaagccttccaaggcattaagtccgcctttatcggcgagaaagaagtgttttcggacatacagcttccggattctgtttctcatacgaacggacaatttacgcttcatccgagcatcattgattcggctattcagacggcgacgatctgtattatgcaggagttttccggacaaaagctgattctgccgtttgcgttggaatatcttgaagtcatcaaagcatgcacgccgactatgcgggcgcatgcacgcttcagcgatggatatcaaaccggtgattccgtgcagaaagccgacattgacctgttcgacgaaacaggagcgctttgcgtgaaggtgagaggattctctacgagagtgcttgaaggcgatgcagaatcggctcagccgccatcaggatcggaaaaggtcttgtttgcaccggtctggaaagaagccgccgcatccgagaaagcttctgtccgtgctgatgagcatttgatcatactttgtgaagatgcctgccgtataaaagatgaaacggcattcggcctgaaagacgccgaactgctgattgcagaaggtgagggtgaaacagccgctgaacgcttccaaagctatgcgcagacaatcgccgaacacatccggcggatcatcagcgaaaaaaggcagggccgcattctgattcagaccgttatttcagcagacggcagccagcaattgtttgcggggttaacaggtttgttaaaaacagccgagctggaatacggaaaacttgactgtcagctcatcgaaatggaatcaatcggcgaaatgccggctgtcgctcaaaaactgaaaaacgacagtcatcggccgcatgataaacatatccgttataaaggagaaaaacggtatgtgaaggcttgggaagaaatgcatcctgcaggaggcggcaccgtctggaaggacgaaggtgtatatctgattaccggaggggcaggaagcctgggcttgatgttcgcaaaagaaatcgcaggtcgcgtaaaacacccgaaaatcattctgacgggccgctcaaatctggcagaagccaaacagcgtgagcttgctatgcttcagcactcaggcgcaaatgtcgtctacaaaaagctgaatgcggcagatcggcgggaaaatgaagcgctgatcaaagagattacggagaaattcggaaagcttaacggaattattcacgctgcgggagtgatacaagaccgcttcctgctgcaaaaaacgaaggaagagttcagggaagtgcttgatccgaaagtgatcggaaccgcttatttagatgaagccagcaaagactgcaatcttgactttttcgtattgttctccagtgtttccggcgttctcggcaatgtcgggcaggctgattatgccgccggcaacgcgtttatggatgcatacgccgcttacaggcaatcccttacggagaatggcctgcggcacggaaaaacggtcgcctttaactggacgctgtggaaagatggcggtatgcaggcgggagacgagacggagagaatgatgaaaaaagttttcggcatggttccgcttcaaaaggcgtcaggcctggctgcattttatgaaggaatggctcaggaaaagccgcagcttttagcagccgaaggacacgcagcgaaattaaaacagtcgttcctgtccgtttctgaaactgaaaagccgcaggtgcagaaaatagagcctgtatccgccgtttcgggagacaaatggcacggtgcgcttatcagattggtcagttcaattttaaaagtcggccaagacgagattgatattgatacggaactgagtgaatacggttttgattctgtatcgtttaccgtctttacgaatcaattaaatgaagcgtatcagctggaactggcgccgacgatcttcttcgaacacgggacgatccgcagtttagcggagtatttgacggatgaggcagaagccgggcttccttctcagccggaagaaaaacacgatgcagaagaatctcttcaaacgcttcacaccgctttgacagccatggtaagcggcattttaaaagttgaccgtgaagacatagatacagatacggaattgagtgaatacggttttgattccgtatcgtttaccgtctttacgaatcaattaaatgaagcgtatcagctggagctggcgccgacgattttctttgagcacggaacgatcagcggtctcgccggatatttggcaaaagagcatccgggccgtttcggcgaaaagaagaaagagtctccgaaaaaagcgcagccaaaagcccaaaaaccgaaaatgcagcggaaaaagcgcttcgcaacggtaatgaacgctgcggcagcgacacaagagccgcgccgctttgacccggttgccattgtcggaatcagcggccgattcccgggcgcgaaggatatagaggaattttggcgcaatttgaaagaaggaaaggattcgatcacaaccattccgaaagaacgctgggattggcaagcgtttgatggcgacccgaatcttgaagggaacaaaacgaatatcaagtggggcggctttatcgacggaatagctgaatttgatccgctgttctttgggatttcaccgcgggaagcccaatatttagatccgcagcagcggctgttattgacttatgcatggcgggcgatagaagatgcgggctgtaagccggaaagcctttccggtacaaatacgggcgtctttatcggcaccggaaataccggttataaagatttgttcacaagggcaggtcttgcgccggaaggacatgcggcgacaggcagcatgattccttccattggtccgaaccgtttgagctatttgttaaatcttcacgggccgagcgagccgattgaaacggcatgttcaagctcgcttgtggcgattcaccgggcggtatccgctatagaaaacggagaatgcgacatggcgattgccgggggaatcaacacgattctgacggaagaagcgcatatcagctacagcaaagcaggcatgctcagcaaagacggaaaatgcaaaaccttctccaaagatgccaacgggtatgtcagaggagaaggcgcgggaattctgatgctgaagaaactgacagatgcagaacgtgacggcaatccgatttacggtgtgatccgaggtacggctgaaaaccacggcggccgggcgaatacgttaacctcgccgaatccgaaactgcaggctgatttattggtgaaagcataccggaaagcgggagtggacccgagcaccgtcacgtatattgaagcgcacggtacaggaaccgaattgggcgacccgattgaaataaacggtttgaaagcggcgtttcacgagctggcgaaaacacatcaagagcctgaagtctccggtcaccgctgcggcatcggttcggtcaaaagcaatatcggccatttagagcttgccgcgggagtatcaggcgtcatgaaagtgcttttgcaaatgaagcacaaaacgctggtgaaaagcctgcattgcgaaacgatcaatccgtacattcagctcgatgacagtcctttctacatcgtgcgggaaaatcaggaatggacggcagcaaaagatagaaacggaaatgccattccgcgccgggccggggtcagctcatttggcatcggcggggtcaacgcccatatcgttattgaagagtatgtcccgaaagcagccgctcagcctgagcacagcccggaaaatccggcaatcatccttttgtccgccaaatcaaaagaaaaactgtttgaacaggcgcagcagctgcaaaaagcgatccgtcaaacgccgtatacagatcaagacttggcgggcgtcgcttatacgctgcaaaccggaagggacgaaatggaagagcgcttggccattcttgcagcgacgatggcggaattggaaacaaagctggaagcatttacgaaaaatgagaaaaacattgccgggctgtataccggccagtctcaccgcaataaagatacgtttgccttgttcacggcagatgaagatatggacatcgtcattgacgcctggattaaaaaaggaaaattcgccaagctggcagaggtatgggtgaaaggcggcgtattgaattggaaccggctgtatgaaaagggtacgccgcgtttactcagtcttccgtcttatccgttcgcaaaagacacgtattgggtgcctgagaatcctgacaaaaagaaggtccatacagaggaacggatgaaacgtattctgacgaaacaatgggaactgagcccgctcgaactgggtgaaccgtgcgcacgttccgttgcgattttgacaggcggggacacgatcaatctcgcagaagagatcgcagcgcacatgccgaatcaccgtatcatcaccgcatcagaccttaccggtgaatatgactggcaggcgtttgacggagtcatcgacctcttcggcgcagcgaaagaagattctcaagacatggccggaatcaaatggcttcagcaattgattgagcatgggcataaagaagggatgacactgctttgtgtcacgaaagaccttgagtcattaaataaagaggccaatcaaacaacaggagcaaaacgggctggtctgtacagaatgctggcatacgagtacggtcacctgtcttcaaggcatctcgaccttgaaggagcgctttcggatgacaaactggcgaagcagattgccgatgagtttcatgcccgcactgatgacgcggaagtttgccggagggatggcttgcgctaccgcgccgtattgagcggatcagaaaatatgaatatgaaaggcgagagaattgattttccggccaaccatgtgcttctgatcaccggagggacgagggggatcggtcttttatgcgcacgccattttgccgaacattacggagtgaaaaaactggtgcttacaggccgcgagacccttccgccgcgaagtgagtggacgggcggactgaatggggtgacggcttctgtaaaagcgaaaattgaagctgttctcgacttggaatccaaaggtgtacaagtgaaggttttgtcagtcccgttagctgatgaagctgggctgagacaggaactgagtcagataaaacagacgctcggacctatcggcggcgtgattcactgcgcgggtgtgaccgataaagagacgctcgcattcatcagaaaaaccgatgaagacatacagcgcgtgctcgagccgaaagtagacgggcttcaggcgttatacagtgtgctcagcgaagagccgctgaagtttttcgtcttgttctcttccgtgtcagctgcgataccggcactttcggcaggacaggccgactatgccatggccaatgcgtatatggactattttgcaaactcatacaaagagcagctgccgatcgtaagcattcagtggccgaactggaaagaaaccggaatgggcgaggtaacgaacaaagcttataaagagagcgggctatacagcatcacgaatgcagaaggattacagctccttgacagcatacttcttgaatcagcaaggggcccggtgctgccggccgttctgaatcctaaactgtggaagccggagcgactcctgcggcggagcaggcaggatcagccaatgagtccggctatggtaaaaccggcggaaaaaaccgcttatactgccgcagacaacgctcaattaacaaagaaaacagaagaatggctgaaagaattattttctgaagagctgcggattgaccaggaccagcttgagacagacgtattattccaagattacggagtggattccattattcttgctcagcttctgcagcggatcaatcggaatctctcggcatcgcttgacccgtccattctgtatgaatatccgacgattcaatctttcgcaaattggcttctcgaaggatatacagaagttttgtcggaacggtttgatttggcggcggcggagcctgttaagaaaaagccggctgagccggtaattgaaacacaagccgttaaggtgcaagaagagccggccggaaaacagattcaccgggaagatatcgcggttgtcggcatgtcctgtcggtttccgggagcggcttccttagaggcgtactggtcgcttttggctgaaggccgttcggccatccgtcctgttccggctgaacgatggggtttgaagacgccttattacgcggggatgctcgatggaatcaatcaatttgatccggacttctttttactggctgaagaagatgtaaaggcaatggaccctcaagctttggccgctctggaagaatgccttaacctgtggtatcacgctggctatacgccggatgagataaagggagaagcaataggtgtgtatctcggcggacgcagccgtcacagaccgggtgaagagaaactgctggatgcgaaaaacccgatcgtcgcgctgggtcagaattatttggccgcaaatctctctcaatattttgatatgcgcggcccgagcgttgtcctcgatacggcttgttcttctgctttagtcggaatgaatatggccgtgcaggctcttgtaacaggagaaataaaagcggccgtcgtcggcggggtgagcctgtttgaatcagaagaaacccataaattatttgaacagcgcggcatattaagtaaagcgcagtcgttccatgtatttgacgaacgcgccgatggagtcgtgctgggcgagggtgtcggaatggttcttttaaaaaccgtgtctcaggcgattgaagacggagattctatttatgccgtagtgaaggcggcatccgtcaataatgacggaagaacggcaggcccggctacgccgagtctggaagcgcaaaaatccgtcatgaagacggctcttgaaaaaagcggaaaacagccggaagacattactcatattgaggcgaacggttcaggcacggtcgtgacggatctgttagaactgaaggccattcaatccgtctaccgttcaaaagacgccggcccgctcggaatcggatctgtgaaaccgaacatcgggcacccgctttgcgcggaaggaattgcaagtttcataaaagttgttctcatgctgaaagaaaagagctttatcccgtttttatcaggcgagcatgaaaatacacattttgatagagaaaaggccaatattcagttcagccgcactctggcagactggccgtcaccaataccggcggcaggaattaactgctttgccgacggcggaacaaacgcccacgtcattgtggaagcgtggcaggaagacgaagggcgccgaatcaagcgccatcctttaacaccgcctgcattaaataagcggctgatttcgccggacagcaaagaagaaacgaacgaaaaagctgcggcaaacatctgggatacctatgaagtggaggtttaacgtgaagaacttcaataagcaaatcactttatcgctgaaaaatccgtttattttacatcatgacgtttacggacaaaaagtccttccgggattggcttatattgatatgttttatcagattttcaaagagcgcggctattcatacgacgggcttcagctgcgccatttatccatatatcagccgcttattgcgaaagaagacagcgccgtcaagcttacggttgaatgtacaaaggtaaaagaagggcgctggaaacttaccgcaaaaggggctgaggtcagcggcggacgagtacagccggaagaacgtatttacgtcaaagcggaaatgcacgagacggcacccgcaattttcagtgacacgcttgatcttgactctgtcaaacgcggggcggaacgcaccatcgatttaaatgagctttatgcacaatgcagaagccaggaattggttcacagcggatatatgaaagcagaaggagaagtgttttccgagcgagacggcgtcacctttgatgtatcgctcggaaaagacgcgatgggacaggccggagggtttttgttccatccgactcttcttgacggaagcggcgtcggcgcaaacctattgatctcatcgctgttaaacggggaaaagaggctgtttctgcctcttttctacgaatcttttacagcttccgaacctttgcaggccggctgcatcacgagaatcaaacgttcgtcgcttcggcaggaaaaggagctcatttacattacactggagttttttaacgcatccggccggaaagtagccgagctgaaagatttcacaagcaagctcgtgcgggatgccgagctgatcaatacagaacgaaagactgctgagaagtctcctgaaaaagccggtttaccggaagttgcggcatcgcttgaaggcggacacccgcatgaggaagcagagaggtatgtcatgaatttgatggcggaaaaaatcggcaagccgcttgaacagattgattctcaagtcggctactatgaaatggggctgacatcgtccggactgcttgacgtcgtcgaaacgatcagcgaaaaaatcggcgaaaccctttctccgactttgctgtttgaatatacgacggcagcagagctggcggctttcctgactgagcagtacgggagccatttcagcgcgcctccggcaaaaatggcgaagccggttgagccgcaaacagaaaacaggcggaaaagcagtgttccgcaagatgaagatatcgcgattatcggcatggccggccgctatccgcaggccgaaaatattcatgaattctgggaaaacctgaaagaaggaaaaaactgtgtcaccgaaattccggagtctcgctgggactggcgccggtttgaaaatgtaaagtcgccttccggaaagagcatttcaaaatggggcggatttattgatgatacggattgctttgatccccaatttttccggattacgccgcgggaagctgaaacaatggaccctcaggaacggctgtttttacaaacatgctgggaaacgattgaggatgccggatatacgccgaagtcgctcgcagaggcgcgcggacggaataagagacagcgcgtcggcgtcttcgcaggggtgatgcataaggattatacgttggtcggggctgaagcttcttctgaagatcatgtattcccgctttctcttaattatgcgcaaatcgcaaacagagtttcatatttttgcaattttcacgggccgagcatggcggtcgatacggtctgttcatcttcgctgactgcggttcaccttgctgcggaaagcattcggcgcggggaatgtgaatcggcggttgccggaggcgtcaacttgtcgctgcatccgaataaatatctgacatacggtttatgggacatgttttcaacagacggggtttgtcatacattcgggaaagacggagacggctatgtaccggctgaaggaatcggtgccgtgttattaaaaccgctgcgagaggcggtaaaagacggcgaccggatttatgcggtgataaagggcagtgccgtcaatcacgtggggacagtgagcggaatttccgtgccgagtcctgtcgcgcaggctgatttgattgaagaatgcctggacaaagcgggcatcgatccgcgcacggtcagttatattgaggcgcacgggacgggaacttctctcggcgatccgattgaggttcaaggccttgtcaaggcgttccgccagtacacacaggacaaacagttctgttcgatcggatcagtgaagtccaatatcggccatgcggaatcggctgcgggcatcagcggcttaagcaaggttgccctgcagcttcaccataaaactttggtgccgtctcttcattcggaggagctgaatccgtatttagattttgaacaatcaccgttttacgtccagcatcataccgaagcatggcagcagccatcagtgaccgaaaacggaaatgagaccgtatatccccggcgtgcgggcatcagctctttcggggcgacaggttcaaacgtgcatctcattctggaggaatttatccctgaagaatcacacggaacaaatgctgaaccggcagaagaacagacattcatttttccggtttcagcccggaatgaagaacggctaaaagagtatgttgcgaagctgtctgcatttattcatcccggcctgccgcttgaggatgcggcgtatacacttcagatcggccgtgaacagatggaggagcgggttgcgttcaccgctcagaatatgacacagctcaaagagcggctggaaggctttctggcgggtaaaacggtcagcgggtgctggcggaaccgagctgataaaagcaaacaggcagagcttgctccggacttgatacataaatggctttcttccgggagtctggagatgattgccgaaaagtgggccggcggaggaacgatggattggaatctcttatacggagaaaacaacccgaatcggatcagcctgccgacgtatccgtttgaaaaaatccggtattgggtgccgaaggcggagaaaagagaatcgctgccgcaaaaaaatgcaggcatgctgcatccgctcctgcatgaaaatgtatcaaacatgtcaggcgtccgttttcggtcctcgtttagcggcggagagtttttcctgaaagatcacgtcgtcaaaaacgagcggacgttaccgggcgcggcttatctggaaatggtccgggcggccgttgaacatgcggcagaaacgaaggaagaaggaacagtccgtctgaaacatgtcgtatggatacgtccgtttacagcggcggatgagtccgcagaactgtatctccgcctttatgacgaagaaaatggagagatgggatttacggtttacagtgaatcggcttcctcggaagaagaacccgtactctatgcgcaaggaagcgcagcgtttgtccgagcgggcgaaccggtcaaaatcgagattggcaaattaagagagtcacgccgtctgatcacacctgacgcttgctatcaggcatacaaacagatggggattgaatacggggatgctcacaaagcggtcacggaaatctatgcaaaagacagcgaagtgctcgcgaagctctcactcccgtcatctatttctcatacaaaagatcagtttgtcctccatccgagccttttggatgcggccttccacgcgacaatcgggttaatgcttgacagagacgggactgacatacggccgatgctgccgtttgctctcgaacagattgatgtgttgaaaagctgtaaaagcgatatgtgggtttccattgcgtacagcggcgaaagtaagcctgaagatgccgtgcagaagctggatattgatgtatgtgacgaacaaggcaatgtatgtgtgaaaatgactggttattccgcacgggaaattgaaacggataaaacagatacactattttttgaacacgtatgggaagagaaggccgctgtacatgaagaagcgccgatccatttcaaagcccgtcacgtgatgatatctgaccggtttacggatcaaatgaacagcatacagacagacttcagctgtcatgtgctccgtgatcagcataagagtgaagacgaacggtttgaagcttgtgcgcttcaggcgttcgaagaagtgaagaaaatcctcgcttcaaattccggcgggcgcgagctcattcagattgtcgtgcctcaagaagcggatacgcagctcctttgcggcttaacggggcttttgaaaacagcggcgcttgaaaacccgaacttgaccggccagctgattgaattggagccggacgtcaaggcagacacgctgtcccgatatgtaaaagaatgcagcgctcaacctgatgacaagcatattcgctatgaaaacggcaagcgctatacggcacaatggcaggaaacagggcttgaacagttcggcgccgaaaagccgtggaaggataaaggtgtttatctgatcacaggcggtgcgggcggactcggatttttattcgccaaagaaatcgcccggcatgcaaaagacgccgttcttattttaacggggcgttctctgttggataaccgtaaaaaagcccagcttcaagaactgtccgatctcggcgcgcaagccgtgtacaaacaaacggacataacggaaaaacaagaagttcaatcgctcacagcggacatctgtcggcagtacggcggattaaacggtatcatacacagcgccggaacgataaaagacaactatattctgaaaaaacacaaagatgaagtccgtgatgtactggcgccgaaagtctccggactggttcatcttgatgaagcggcaaaggacattgagcttgattttctgattcttttctcttccggagccggaagcgccggaagcgcgggccaggctgattatgcgatggccaatgcgtttatgaacgccttcagtgaaaaaagaaaccgtaaaaaagcccgaaatgaacgctatggacataccctttcaatctgctggccgctttggaaagacggcggcatgacggttgatgctgaaacggaagccatgctgacaaaagaaagcggcatggtccctatgcaaacagaaaacggcattcaggctttataccgcgggtgggcggcaaacacatcccaagtcatggtgacggaaggctacgccgcaaaaatccgggcgtttctgaaaaaatcagcggatgatcagccggataagggcagcgaaacggaagaaacggcaggtcttacagcaggcggagagaacatgcttgcagaaaaaacggagcatttcttgaaacaagtgctttcggaagtgaccaaacttcctgtcggcaaaattgatgccaaggcgcctatggaagattacggaattgattcgattatgattatgcatttgacgggccggctggaaaagagcttcggctcattatcaaaaacattgtttttcgagtaccagaatatcgaatcgctggcgcagtattttatgaaagcacaccgggacacgctgctggaagtgaccggggtgaaaacagaagaaaccccagcagccaaaccagcgctgtctgagaaagcgaaagtaaagcccgttttcaaacggaatgaaggcaaaaaaggctttgcgcaagtccgtccggacacgcggaaaaatcagcagctgacagagcgtgaagatatcgcgattatcggtatatcaggacgatatccgcaggccgaaaatcttcaggaattttggaagaatttgagtgaaggcactgactgcataaccgaaattccaaacgatcgttgggatcacagtctttattacgacgctgataaagataaagaaggcaagacgtacggaaaatggggaggatttttgaaagacgtggacaaatttgatccgcaattcttctctatttcgccccgggatgcaaaattgatggacccgcaggagcggttattcctgcaatgtgtctacgaaacgatggaagatgccggttacacgcgcaaaaagctcacggaaaaatcgggtgatttgcttggcgccaatgtcggtgtttacgtcggcgtcatgtacgaggaatatcagctttacggagccgaagaacaggcgcgcggtaaatcgcttgcgctgaccggaaatccgtcatcaattgcgaacagggcttcctatgtattcggttttaacggcccgagcatggctctggatacgatgtgctcttcttctttaacagccattcatctggcatgccaaagcttgcggatcggggaatgcgaagcagcatttgccgggggcgtcaatgtatccgttcatccgaataaatatttgatgctcggccagaacagatttttatcaagcaaaggcagatgtgaaagtttcggagaaggcggggacggttatgtgcccggtgaaggagtgggcgccgtactccttaagccgctttctaaagcaaaagcggatggtgatcatatttacggcctgatcaaaggaacggccgtgaaccatgatggaaaaacaaacgggtattccgtaccgaatccgaacgcccaagccgcggtgatcaaacaggcgttaaaagacgcgggaaccgatccgagggcggtcagctacatcgaagcccacggcaccgggacttcactcggcgatccgattgaaatcacgggtctgacaaaagccttttcagaacaaacacaagataaacagttttgtgccatcggctcagcgaaatccaatatcggccactgtgaaagcgccgcgggcatcgccgggctgacgaaggtgctcctgcaaatgaagcataagcagctcgcaccgtcattgcattcccggacgcttaacccgaatattgattttctcgctacgccgtttaaagtgcagcagacgcttgaagagtggaaaagaccggtcataaatgaaaacggagtaaataaagaattgccgagaaccgcggggctttcctcattcggagccggcggcgtcaacgctcatatcgtcatcgaagaatattccgctgatgaggataaggagacggcttttgccgcgcctcatccgtcgatgatcgtcctttccgcgaaaaatgagcaacggcttcaaaaacgggcgaaacgtcttcttgatgcactgcggagcgggcgttaccgggaagcggatctgagccggatcgcatatacgcttcaaatcggccgtgaaccgatggaagagcgtctcggaatgattgtcagcaatttgcgcgagcttgaagagaagcttgacgaatttacgggcggcaaggagtcaattgaccagctctaccgcggacaagtcaaacagaataaagacacgatggcgctgtttacggctgatgaggacatggaaaaaaccattgaggcgtggcttgaaaaaggcaaagccgcaaaggtattagagctttgggtgaagggccttccgctgaattgggataagctgtatcaaatgggcagaccgcaaaaaatcagtcttccggcctacccgtttgcaaaagaccgatattggatcgacatatcagcagatgcagctgtcaaaagaccggccgaaacacagtctgcgccgatcgcaccggcggccgccccggaaccggtcattgaagtaacaactcttcacgacgagactgccaaagaaaaaccgtcaaacattacactgcagactttgagcggcgcgaaaccgaaaagaaccgtacagtctgtttcccgtccggcggtttccgctgaaaaagtaagtgccgtattgaccgaaagtttggcagacgttttatatatggatgccgacgatatcgacgcagacgacacatttattgatatcggcatggattcaattaccggtcttgaatggataaagtctgttaataaagcatacggcacgtcccttacggtgacgaaagtatatgattatccgacaatccgccagtttgcggctttcttgcaaaaagagctcgggacagaaccgatccttgaggaagcaaccgaaccgcagaaaacagaggccgtgaaaaaaccgtcaaacatcatgctgcagcctttaaacgctcataagcagcatgtgacacaagcagaagcggatattctggaggcgatgtctgaaacggcagcttccgccgaaccggaagaaccgattgaagcggtgcatgacgagttatcaaaagcactggctgatgtattgtacatggagcggcatgaagtagatattgatgaggcctttattgacttgggtatggattcgattaccggtcttgaatggataaaggccgtcaataaacggtacggcacggactgtaacgtaacgaaagtgtatgattatccgacaatccgtcaatttgccgattttctgagtacgcagccgtctgtccgcggaagaaaaaaacaggcggttcccgtacgtccaaagccgcttacgcagcaacatgccccgcaggagaaaacacctgccgagccggagagattaacggttcaaaaggaacctgaaccggtgcaggccaaacgggagcctaaagacgagatagcggacgcgatagccatcgtcggcatgtcgggcaagtacccggatgcgccggacctaaagacatattgggacaacttagcccgtgcgaaaaacgccattcgcgacatcccgctttcccgctgggatgtaaacaaatactatgatccggccttaaacaagaagggcaaagtatactgcagatcaatcggtatgcttgacggcattgaagagtttgatccgctgttctttaatatatctccgtctgaagcggaacttatggacccgcagcaccggatatttttacaggaaggttttaaagcctttgaagatgcgggttacagctcaaaagaattaaacgggaaaaattgcggcgtttatttggggattatgaacaatgaatacggcatgatgttaaacaaacatcagacaggaggaagcgcgacgggcaacagtttcagcatcgcggcggcccgcctgccttattatctcaatttgaaagggccggccattccgatcgatacggcatgctcttcatctctcgtcgggactcatttggcgcgtcaggcgctgttgaatcatgaaattgacatggcgcttgtcggcggtgtgaccttgtatttaacgcctgaatcatacatcagcatgtgtgaagcaggaatgctgtctcctgacggccaatgtaaagcatttgataacagtgcgaacggatttgtgcctggcgaaggcgcgggggcgctcgttttgaagaggctgaaagatgcggaagccgagcaagaccatatttacggagtcattatcggatctggaattaaccaggacggaaaaaccaacggcattaccgcaccaagcgcgaaaagccaaatggatttagagcgccaagtgtatgaagcgcacaacatccaccctgagagcatcacctatgcggaaatgcacggcaccggcacaaagcagggggatccgattgaattagaagccctgtcttctgtatttaaggaaaaaacggatcgcaaacaattttgcgccatcggttcggttaaatcgaatattgggcatacgtcggcggcggcaggtgtagcaagcgtccagaaggttctgctgtcgatgaagcatcagcagcttgtgccgacccttcatttcagcacgccgaatgaacattttgatttcgatgactcgcctttatttgtcaataccgaactcaaaccttgggaaacaggcggagcaccgcggcgggcctgtgtcagctcattcggctacagcggcacaaacgctcatctcgttatcgaagagtatcagccgaaagaccggggaagccgtaagcctgatgagacaaacatttttgtgctgtcggcgaaaaaagcgccccaggtaaaaacctatgccgagtctgtgatcgaatttgcaaaagccaatcagaatatcaatctttcagatatggcgtacacgcttcaaaccgggcgtgatgcgatggattaccgtcttgcggttacagccggttcgagagaagaactgatcagccgtttaaccgattttgtaaacggaaatacgggtgaagggatatatgaagcccatatcaaaacggctaaaaaagaactcaaagcatttgaaacggacgatgacctgaagcagcttgtgaggtcatggttcgataagaaaaaatacgccaaaatagcggaattgtgggccaaagggcttcagatggactgggacagactctatcaaggcgaaaaaccccacagaatcagtctgccggcttacccatttgcgaaggagccgtactggctgcctgagccgaaagccgtaccgcaggaaacagaagaccggcgcgaggctgtgcttttagaaaagcaatgggttccgtgtgagatcgattcggccggtgagaaaagcggcaggacggtcatgattctggctgatgtaagaacagcggagctagccgaagagactgcaaagcatttcactgactcattcattctcccggtcgattcggctgacactgcagctagcgattggaatcacatagatggcgcaatcgatctgacgggatgcggagacgaagacccttcactggaagggatcagccggctccagactctgattgatacaagccgccggcaggcgcggccgctgacgctgctatatgtaacaaaaggcttggagccatttcagcagaaaacgattcatcttgcaggagcggcaaaaagcggcctgtacagaatgcttcaaaatgagtatcaaaacgtgacgtccagacacatggatgccgatacagatacggatcagcagacgcttgccaaacagattgcagatgaatttgcggcggacagcacagaaccggaaatctgccgccgaaacggacagagataccgtgctttattcagggagattccaagcgggaagcgagcagaacataagcccgcaccgtttcctgaagaccatgtgcttttcattaccggaggcacgaggggactgggtctcttatgcgcccgccatttcacagaaaaacacggcgtgaaaaaagtagtgctgacaggcagggagccgattcctccccgtcataaacggtcagccgttaatacgaggctgaaagagaagatacgggcgattgaagagcttgaagcaaaaggagtgcaagtggcggtgatcagtctgaaattgtctgatcatgatgcggcggcagcggaaattgaaacgatccggcgcacgatgggaccgatcggcggcgtcattcattgtgcgggatctgttaattcagtaaatccggcgtttatcagaaagactgctgacgatatacaagaagtgctggaaccgaaagtcgcagggcttcaaacattaagcagccttttcacaaatgatcctttgcaattttttgtcttattttcttcagtatctgcagtcgttccggcgctcgcggcgggacagtcggattatgcgatggcaaatgcgtacatggattatttcgcggcggctcatcagcatcaatatccgctggtcagtattcaatggccgaactggaaggaaaccggattgggtgaagtccgcacagaaagcctgaagcagaccgggctgctgggactgtccaacgcggaaggacttgacttgctggaccgtattttatctgaaaacatccgcccgtccgttctgccggctatcattgatcggagcgaatggcatcctgacaggctgctctgtcaagagaaaaaacaaaaagagactgaagccgtaataaccggcaaagccgctgaaaaacattcagacagagaactgcttcttgatacgaaggcgtggcttgtgaaactgttttccgatgagctgaaaatcgctccggaagagctggaaacagacgaaccgtttcaggattacggggttgattcgatcattttagcgcagcttttacagcaaatgaatcaagcgctcaaagaggacttagatccgtctgttttatatgaacatccgacgattgacgcgtttgccgaatggcttgtatccaatggacagccgctgcttgcagaaagggaggaaccggatacagaaatcttggttccggctgccgtacaaacggttcatactgaacaaaagcgtgatgccgtaactgaagacattgccgtcgtcggaatgagctgccgttttccgggagcggaatcgttagaacaatattgggacttgctgagaagcggcaggtccgcaatcggctccgtcccggcggaacgtttcggatatgcaaatcaatacgttgcgggattgattgacaatatggatcactttgattccgaattctttttcattccggaaaacgacgcgaaagcgatggaccctcaggcattggcggtgttggaagagagcttgaaactttggtgccatgccggctattcccgtgaagaaatcaagggtatagaggccggtgtgtatatcggaggccgaagccagcatcagcctgatcctgaaattcttgcgaatacccgcaacccgatcgttgcgggcgggcagaattatttagcggcaaacgtttcgcaattttttgatctgcgcgggccgagcatcgtgcttgatacggcttgttcatcggctttgacaggaatgaacatggccgttcaggcactgagaagcggcgatatcaaagcggcggtagttggcggcgtcagcctgctgaacacggatgcggcgcaccggatgttccaagagcgcgggctgttaaacgaaaagccggcatttcacgtatttgacaagcgttcaggcggagttgtcctcggtgaaggcgtcggcatggtgctgttaaaaacagtaagccaggcgcaaaaagacggcgacacgatacacgcggtcattaaggctgccgccatgaacaatgacggcagaacggcaggcccgtcagctcctaatatgcaggcgcaaaaagacgtcatgcaaagcgcgcttttcaaaagcggcaaaaagccggaagacatcagttatatcgaagcaaacggatcgggttccgctgtaactgatttgcttgagctgaaggcgattcaatccgtataccgctctggccagcatgttccgctcggcatcgggtcaattaagccgaacatcgggcatccgctttgcgcagaaggcatcgcaagcttcattaaagtcgtattaatgctgaagcataaacaaacggttccgttcctctcaggagatgaaccgatgccgcattttgatataacaaagacagattttcattttcataaaacagccggcgaatgggatgcatccagaccgtcagcagccatcaactgctttgccgacggcggaacgaacgcccacgtcattctggaagcttgggaagaaaaagacacccgaatgaaaagaaagccgctgccggtaccgtcattaagacgtaaggctctggtaaaagagcctgacgcaccggcggagaaacaagagcttcctgcgaaaaaaatgttttggaaagcatttaaatgagagaggagtgggaaggaatgatatcggaaaaaatcaatatctcactggatcatcccatcatgaagggccatatggtctttggtgaagcggtattgcccggtcttgcttatatcgatttgatttatcaggtttttcaggaacacggttatgtatacaatgagctcgaattgaagcacgttacgatttatcagcctttaaccgtcagtgaaacggctgcaatcattctgaccattcaatgttctgatagcggagatggaaagtggctcatctccctttcagggcagaaacagcaaggtgacgagctgtcagacaatatacaatatgcgacagctgaaatggtgaaaagagacgctgtgacatttgacgaaaccattgatttcggcgatgtgaagcagtcaggcagatctctgaatcttgatgacatgtataaccgctgcctggatcatgacttggttcattccggcatgatgaaatcgaacggacgattgtacgaaacagaaggcggcatgctggctgagctttcttgcgaagaaggaaaagatttctttttattccatccggcccttttggatgcgagcggaatcggggcgagcggtttgctttctgaaacaaaccggcttcatctgcctttatattatgaatcgttcacggccgccgacaggctgcaatctgagtgcacggcgcgtatcgccgcttccggcgtccgtcaggaaaaagaactcacaacgatgacgatcgagtacttcagccgatccggacaaaaggtggcggagcttaaaaacattacgggaaaagcggttcggttcgaagaagacgagaatacagccgaacagaatcaacaggctgcaactgagccggaaagcacagatgaaaaagacatcattctgtttttaaagaagcttttggctgataagcttgggcagccttgggagacgctggacgttcttgcaggctactatgagcttgggctggattcatcttctttgcttgagattgtacaggatatcagtaaaaagacgggtgcggacctcgcgcccactcttctctttgaatatacaaatataaaagaactcgcagcctatctgaaaaagaccgtttcatttgaatgtgcggaacgtgcagccgaaccatcacggtctgaagctgaagcgccggacgcgccagaacatcataaaaacaccggagacatcgcgattatcggaatggccggccgctatccgaaagcgaaaagtgtggcggagttttgggaaaacctgaaggcaggcacggattgcatcactgaagttccgaagtcccgatgggattggaaaacatatcaaaacgtaacgtccccgtctggaaaaacagtatcaaaatggggcggtttcattgacgatgccgactgcttcgatccccagtttttcagaatctcaccgcgtgaggcggaaacgatggacccgcaggagcgcctgtttttagaaacatgctgggaaacgattgaagatgcagggtatacgcctgaaacgctgggaaataaaggggagaaacagcatccgatcggcgtatttgcaggggtgatgcataaagattattccttaatcggcgcagaacaattatctgaaactgatccttttccggtttcactgaattatgcgcagatcgccaacagagtgtcctattattgtgacttccacgggccgagcatcgcggtggataccgtttgttcctcatcattgaccgccgtccatctggccatcgaaagcatccgccgcggcgaatgtgaggccgcgcttgcgggaggggtgaacttgtcgctgcacccggcgaaatatctcagctacggaagcgtgggcatgcactcaagtgacggccgctgccgtacattcggcgagggcggggacggctacgtttccggagaaggagtcggtgcggtattgctgaagccgctggaaaaagccgaacaagacggcgaccgcatttacgcggtcattaaaggaagcgccgttaaccacgtcgggaaagtaagcggaattaccgtcccgaatcctgctgcacaggcagaagtcattaaggcctgtctgaaaaaagcaggtatcagcccgcggaccgtcagttatgtggaagcccatggcacaggtacttcgttaggagacccgattgaaattgaaggtctgtcaaaagcgttcagccaagggacgcaggatcagcaattttgttccatcggttcggtcaaatcaaatatcggccacgcagaatcagcggcggggatcagcgggttaacaaaagcggcgctacagcttcatcacaaaacgcttgtcaaatcactgcattctgcggaattaaatcctcacctgaaatttgaggaatctcctttttacgtacagcagcagactgctccgtggaagcagccgtcagctgaagaaaacggtaaagtcacacattatccgcgcagggccgggctcagttccttcggtgcatcaggttcgaatgcccatatcattttagaagaatacattcagcctgaacaaaaagcgcttgcacctgaaaacgaggcagcaaaactcatcccgctgtcagcaagaaataaagacaggcttctggcctatgcggaaaaactagcccgatcgctttcagaaaagacggtgctgtctgaactggcttatactcttcagacaggacgtgaagcaatggaggagagagctgtcttccttgtaaatgacatccgcgacttgaaagaaaagctgaatgatttcgtaaaaggaaacgaaaacatccccggtttatggcgcggacaagctgagctgccggagatgagcgaagccgctcccgagacggacgatccgaaacggcttgccgcgttatgggcagaagggaaaataatagattggaataagctgtacgcttcgggtaaaccgcgtaaaacaagcgttccgacttatccgtttgcaaaagaacgctattggattccgcagcagaaaaaacaggagaaaagcctgtcaggcacagtactgcatccgcttttacaagaaaatacgtcagatttttcgcagcagcgcttcacgtctctttttacgggagatgaatttttcctatctgaccatgtcgtcaacggacaaaaaatattgccgggcgtcgcctatttggaaatggccgcagaggcggtcaaaaaggctgctgccgtgacggaaaaagaccatagcgtcacactcagacaggttgtttgggtccggccggtcatgattgaagacaaaccgaaggaaatacatattgccctttacccagaagataatggtgagattacctatgaaatatacagtgaggcagaaaacggcgaagatccggttattcacagccagggtgaagcggtcattaccgaaccgggcagcgcccagatagatatcgagtctgtcaaagcttcctgcaatttaggaatcgtgactgcggaagaatgttacggtgcttttgagaagatcggtctggattacggagaggcatacaggggggtacagcaattgctgctcggagaagaccgattattggcccgtatttcactccctgctgccgtacatgacaaaaaagaacagtatacgcttcacccgagtatgatggacgccgcttttcacgcatccgtcggtctgcttgtccgatcgatacatgatgatgcagacagccacgagctttctttgccgtttgcgatgcaggaagtggaagtgttcggaccgtgccctgaacatatctggtcatatatccggtacacagaaggcagcaaagcagatgacaacgtaagaaaatttgacattgatatgtgcgatgatgccggtacggtttatgtccggatgaaaggcgcgtccgtccgggcgcttgacacaagccaaacagcgggcggagaaacctcggaggcgcctgtcggccatacgatgctgattccggcttgggagcctgttgcgcttgaaaaagccggggaagcagcggcggataagcagacggcagtattcggcggaacggattcgagacatacgcgcataaaagaacatctgccgaatgcttcctattatccgatcagaggtacggatgatatcacatctcttacgcacatgcttgaaggacaaaaagaactggagcaaatcatttggcttgctccgcaggctgagagtgcggacagcctcaaggaacaggaaagaaacgttcttcatgtgttcaagctgatgaaagcattacttgccttagggtacggagaaaaacgtttggactggtgcatcgtcacagcaaatgcccagccgttttcggatcaagacagcgccgacccgtcacaagcggcagtcagcggacttgccggaacaatggcgaaagaatatccgcattggcatatccgcatgattgacacagaaacggacggcagctggccgatcgaagaggcgctcagtctttctgccgggaaaaacggtcaaatttgggcgtaccgcaatcagcagctgtttgagcggcaactgataccgcttgacaatatgccgaaaaacggcacgctgtaccaaacaggcggggtttatgccgtgatcggaggcgcggggtatcttggcgaggcatggagtgaatacatgatccgccgctacaaagcacgcatcatttggatcggaagaagcacactgaatgattccatacaggcgaaactcgaccggctcagcgcattcggcccggcgcctgaatatgtttccgccgatgccgccgacagtgcttccttagagcgggcttatcagttcataaaagagcgccacacaaaaatgaacggaatcatccactcggcaatggatctgtctgagcaaagcttaaataatatgaagacagaagagttcaaatcggtgctgcgggcaaaagccgatgtaagtgtgtccatggcggaggtatttggacgggagccgcttgactttgcgctctttttctcctcgcttgtggcatttattcataacgtgaaacaaagccattatgccgcgggatgcgctttcagtgacgcatttgcgaaagaacttgatcagacatggaattgtccggtcaaagtgatgaattggggctattggggcaacagcgaagcggctgaagacggtgattttattcagctgatggatcagatcggattgggattgatcgaaccggacgctgcaatggaggcgcttgaaacccttatgacgctgccggttgatcaggcggctttcattcatacgacaaaaccggtcgcagtcgaagggatgagtgaaagagaaaaaatttccgtttatccgcctcagccgcttgtcttttcacaacagccgaaggtcgctccgcccggcgcacgtcttgttagagaggctgaacatcaggagctcgatgattatctgtatcagctgttgatcgcccagcttaaagaagcagacttgctgacgccgcaaagccttaaagcgtatgagcccgaacatgaatactttaaaaaatggctcaatcaaacgatcgctttccttctggaacatggctatctggaagggaatgcggattcatataaactgtcggcgcgagccgaaaacacaaccgcctcgctatggcaaaaatgggagcaggaaaaagaggaatggctcaacaacgccgatacaaaagcgatgactgttttagccgagacgatgcttaaagcactgccggacattctgcgcgaagacgtgccggcgacagacatcatgttcccgcactcttcaatggaacttgttgaaggaatttataagcgcaatcaagtcgcggattactttaacagcgccctgtcagatacattaacggcttatgtgaaagaaaacatcagcaaacattcaaaagccgagatccgtatcctggaaatcggagcgggcacaggcggcacaagcgcaggcatatttgaaaagcttaggccgtatcaaaaccatataaaagaatactgttacaccgatgtatcaaaagcttttctcgtgcatgcggagacggaatacggcaaacggaatccttatctgacgtataagctttttaacgcagaagcgccgcttgccggccaggacatagagccgggcgcattcgatatcgtcgttgcggccaatgtgctccacgcgacgaaagacatccgccagacgctgagaaacgccaaagccgttttaaaagacaacggtttgctgctcttaaatgaaatggcgggaaacagcctgttcccgcatattactttcggactgcttgaaggctggtggctgcatgaagattctgcccttcgtattccggggtgcccgggcttgtatccggaaagctggaagcgcgtgttagaaagtgaaggctggcattctgtctttttcccggcagaagcggcacatgaattaagccatcagattatagcggcaaaaagcaacggcattgttcgccaaaaaacgcttaaagcaggggccggaaaacggacctctccgccaaaagcagcacatgcgccggaacttcaggcgcaaacaacggtgcaaaaaggcgacacgtctttaacagaaaaaagcaccgagtacttgaaaacgttaatcggagaaacattaaaaattccgccggctcaaattgatccgaaagcgccgcttgaaaaatacggaattgattctatcgtcgtcgtacagctgacaaacgcgttacgaaatgtattggaccaagtcagcagcactttattttttgaatatcagacgattgaggcgctcgtcgctcacttaatcaaaacgaaaaaagacgcgatgatcaaactgacgggacaaacgcctgttcaggaagaacggaaggcatcaccaaaacctcaggctgtacagcctgctaagccgcttcacactgactggcggcggagggaaaaacgggcagccaaagagaccgtccggcaaagttcggttcgcgacgtggccatcatcggtgtttcaggacgctacccgcaggcaaaaacagcggctgagctttgggctaatattaaaaaaggaaaaaactgcatagaagaaatcccgcgggaacgctggaactggcaggattactacgatgaagagaaaggtaaagaaggctctatttatacgaaatggggcggcttcattgaggatatggacaagtttgatccgctgttctttcagatttctcctttggaagcggagcgaatggacccgcaggagcgattatttttagaaacggcgtatgcgagtatcgaggatgccggctatacgcctgacaacctgtgccagagcagaaaaatcggtgtttttgccggcgcgatgaacaaaaactacccgacaggctacggctattggtccattgccaacagggtatcttacctttttgatttccaagggccgagcattgccgttgatacagcctgctcctcttctttgacggccattcatctggcgcttgagagcatatacagcggttcaagcgaatgtgcgattgccgggggcgtaaacatagtgaccgacccgatccattatatgaatctgtcagtcatgaacatgctttccgcaggcgacacgtgcaaatcgttcggagaccgcgcggatggttttgtcgacggagaaggggtaggagcggtcgtattaaagccgttggaccgagcgattgccgacaacgatcacatttacggtgtgattaaaggaagcaccattaacagcggaggcaaaacgaacggatacaccgttccgaatccgaatgcgcaggccgccttaataaaagaagctttcgaaagggcaaacgtcccggcgcgcaccgtcagttatattgaagcccacggtacggggaccgcattaggagatccgattgaaatcgccggattaacgaaagcatttgaagaggatacaacagacaaacagttttgcgccatcggctccgcaaaatcaaatatcggccattgtgaaagcgccgcgggcattgcgggtctgacaaaaatactattccagctcaaagaccgccaaattgcgccgtccctgcacgcggaacagctgaatccgaatattgatttcgcgtatacgccgtttgccgttcagcaggagctcggtgagtggaaacgtcccgtcatcggcggccaagagcttccgagaagggcggggttaagcagcttcggcgcgggaggagcaaacgcccacctcgtcatagaagaatatacggcagacaaagaacctgatgagacgccggcagatcagcccgccatcatcgtcctgtccgcgaaaaacagcgaacggctcactgaaaaagcaaaacagctcagagacgccatccgtgaaaaaagatacagcggcagcgaccttatgagcatagcctttactcttcagacgggccgggtgccgatggaagagcgtcttggttttatcgtccattcacttcatgaacttgaggaaaaactgaatgggtttaccgccggacaaaacagcgccggactgcaccgtgacggcacggaagaaaacaaacggatgcttgccgtattttcggcggatgatgatctggaaacaatcatagacgcttggatcagcaaacggaaatattctaagctgcttgagctttgggtaaaaggattggacatcgattgggcgaaattatacggagaccgtcctccggcccgcatcagcctgcctgcttatccgtttgcgaaagaacgcttctggcatcagcagcctgtacaaagcaaggccgcgcccgttaaggcgccggctgatgaaagtgatccggcggaacagtttgaagtgatggcttttagagaagttcttaaagaacaggctctgccggctgccggagaaaagcaagtcaaaacggtgatttctttcttatctgatcagaagaagcagcaggaagccgtctctgtgatcaaatcgtatgacagtggcattggcgttatttttatcgctcagggagaccggtatgaggctctgtccgccggccgctgccaagtggtgcgggaagatccgcaatcatatgtgaacgcttttgcggatattcaaaaagagtacggtgaagcttctgccattttgtatttatgggcgcttgaagataaaagctgcatcgaagattattcatgtatcgtccatattctcaaagcaatggctgagaccggtctgcagccggaaaggctgttattggcgggggaatatgcatccggtctggaaaagtgctacttggaatcatggatcggctttgagcgttcgctcggcattgttctcccgaaaacaagtgttaccggccacttcagaaaagccggtgcggccataacggactggatgaggaccatttgggacgagctgaaagctgaaacagaccaaaccgttttcttggaagagggaaaacgatatgtctatcacaccgaaccaaccggactaacgaaagaaaacagcaggatcagaaccggcggaacatatctcattacaggcggattaggagggctcggctacttatttgcccgccatctcgcccggaactaccaggcaaatgtcattctcacggggcggtcgccgatcaatgaggaaaagaaagaaaaaatgaaagacctggaaaatctcggcgcgggtgttctttacgccgaagccgatgtttgtgatccgatcggaatgggcgactgcatcaagcgcgcgaaagaacgattcggagccattcacggcgtcattcatgcggcgggcatcgaaagcagaacatccgtctttgaaaatgaaatcgggaatttccgcagtacgcttgaaccgaaaataaacggaagcctgcttcttgacgagtggctgaaaaacgaaacgcctgatttcatctgctacttttcatccacatcggctgttttaggagatttcggctgctgtgattatgcggtcgcgaacaggttccaaatggcgtatgccaactataaaaacgaacaatcagaaagcggaaacgcttttgtcatcaactggccggtctggaaaaacggcggaatggccgtcggcggtgaagagacgacgggcatgtacctgaaatcaagcggccagcgcctgttagaaacagatgaaggcattgagctttttgagcgcatcatttctcaagataacacccagtgccttgtcattgccggcgaaagaagccgtgccgaacgatttttaggcatacggcgggacgattcatcaaaaccggatgcgcttttggaaaccgtgagccgccgcatcccggaagaaagcacggaaaaacggctcgaagcggatttgaaagagctgatacacagtctgctgaaaatatccaaagataaactcgtcctgcataaaaactgggcggaattcggatttgattccatctatttagccaaatttgccgctcttttgacgagtcattacggcattgaagtcactccggcgttattttacagctatgccacgctcggagacgtcatcagctattacttgacagaacataaagaaacgatcgaaacgttttaccgaacggaagaaaccgaaacagaagccgccgctccggaaagcaaggagtatacggatcaggagatcatcgccatgatgaaacaggtctctgaggggacattagattttaaaagagtgcaagacatcatagaagggagtaagacctatgaatcataaagaacttctcgatgcctacagatcaggaacgctcaccatcgctgaagtagaacaaaagcttcaggctttcaagcggacaactgcaaaacgtccgctttctgaaggccagaaaggtttgtggatgcttcagaaaatgtttccggagatgagcgcatataacattccgttatgctttcgttttcaaaagctggatatcgagacattcaaaaacgcccttttgtccgtgcagcgccagcaccctattttgaccagtgtgataaaagaggaaaacggccttccgtatcagatagaagatacggatcggcattttccgattgaagaaatggatctttctgaattaagcgggcgtgatgcgcttacgtttattaaagaaaaagcaaaagaaccgttctcgcttgaaaccgggccgctcctgcgtgttcaagtattccggcgggcgaagcgggagccgattgtgttaatcaccattcaccatatcatttttgacggcgtctctcttatgacgtttatgtcggcgctgctggacgcttatgtaaaagcaagcgaaggcaaagaacctgtcatgcttcagcaggccgcagattatcatgactttgtgaaatgggaaaaagagctgctggaaagcgcagcgggaaaaacgcatctctcttattggaaaaagcagctggaaggaccgctgccggtgcttgagcttccgtcggattacccgagatcatcggtccaaacgtgcagggggcaggcgtatcagcgcttgcttcctgatgaactgaaccggcagattaaagtttgcgcccaaaaacataatgtcaatgaatccgttgtgtatctcgctattttcaaaggactgctctatcaatatacgaatcaggaagatgtcatcgtcggcatgccgacgatggggcgttctgaggctcaatttgagtctgtcatcggatacttcattaatatgatcgcggtcagaagcagggagacgggcgccaaatcttttacgtcgtttttgaaggagctgcagctgacactggcagaagggctggaccatgccgcgtatccgtttcccgcgcttgtaaaagaattgaagacggaacgctcgcctgcggtgtcgcctgtttttcaaaccgcgtttttctatcaaaacttcttccggacagaaggagcggaaaagctggcggaactatatcaatcactcggcattgaaatgatagaagacattcatcaggaaggcgaatttgagcttgcgcttgaagtctataaaaaagaaacgggaaccgtcctgcaatttctgtacaacccggatgtctacagcccttctttcatcgaacgaatggcggagcattatatgaaactggcagaaaaggtgctttctgatccggagatcgcttttgaagcctgttccggcctgctcaatcaaaaacgggatgaaagccgttcatcccatcagccgaatgagcgctgcattcatgaagtgtttgcggaaaaagccggacgccaccctgacagagaagccgtcacattcggtgaaaacagtcttacatatcgcgaattagatgaacgaagcacggcgctcgctgtgtacctgcaagaaaagggcgtcacaccggaatgcccggtcggcatttgtacggagcgttcttttgagatggtcatcggcatcctcgccattttaaaagcgggaggcgcgtatgtaccgctggacccggcttttccaaacgaacggatggcccacgtgttgactgacagcggcgtgtcaatcgtattaacgcaggaaaagacgcgcggcatgattgaacagttggccatcggcggtgtgagcacggtggaaattgaaaacagcggacgttctgtcagcggggctaaactgacgccgcgttcaaaaccgcatcatctcgcttatattctatatacgtccggaagcacgggaaaaccgaaaggcgtcatggttgagcacagagccatcatgaatacgctgcagtttttggaagctgagtatccggtcgcacaagaggatgcctatctgttaaaaacgaattacgtatttgacgtttcgatttctgaattattcggctggtttatcggaaacggacggcttgtcattttgccgcctggtgcagaaaaaaatccgcagctttgcatggaatatatccaaacccaccaggtcacgcatctgaattttgcgcccgccgtgtttaatgtatttctggaaacggtaaagcggcatacggcatttacagaagacggccctgtgaaatatgtgatggtggccggagaggcgtttccgaaagatttagttaaaaagtcagtttccatcttcaaacatgcgagaattgaaaacatatacggcccgacggaaacatccatttatgccgcttactacagctgcggccaaaaggaaatcacaagcaggaatacgccgatcgggaaaccgattcacaatacgcggctttatatcgttgatgaaaagctcagccccgtccctgacggtgtggccggggagctttgcgtggccggcgccggtctggccagaggctattacaatcagcctgagctgacggcggcatcatttattgataatccgtttagtgaaggagaaaaactttacaagacaggtgatttggccagatggctgcctgacggaaatatagaatatgccggccggattgacagtcaggtgaaaattcgcggcttccgcatcgaattgggagcgattgaaacgaaattgagcgaacatccggacattcttgatcaggcggttgtggttcaggaaaagaacggacataaaaagctgattgcttattatacggcccgctccggtcatacggcagacgaaaaagcgctccgcaaccatcttttatcgagtctgccggattatatggcgcctgcccattttatccgcctggatgcactgccgttaacaccgagcggaaaagtgaaccgcaaagacctaaaacagcgcaaggtaatcgttcaccggtctgaaaagacgggcagactgccgttatcagaagcggaagcgaaagtgaccgcaatatgggaagacctgctgaatacggcgggcatcaaaatcgaagacggctttttcgatgtgggaggcgactcgcttctggctgttgcggcggcagaacgcattaaacaggagctggaatgcgattttaccgtcacggatttattcgaacactctaccattcaggcgatcagccgatttattgttgaaacaaaacaggcggctgaatcagtggcgcccggccaagatgagagagaaagagaacaaacaccgcaaaacggggtgccgtcttactttgatgacagtgtggcaatagtggggatttcctgccagttccccggcgcgaaaaatcatcatgagttttggaagcagttaagagaaggaaaggaaagcgtccggttctactcggaagaagaacttcgggaagccggcgtgcctgaagatttgatcgaaaatcccgactatgtgccggcattatcgacgatagaaggaaaagatctctttgaccctgagttctttcacatttctccgaaagacgcagaatttatggatcctcagcttcggcttctgctgcttcattcttggaaagccgtcgaggacgcgggatatgtatcgaaagagattccgaagacaagcgtttatatgtcggcaagcaataattcgtatcggtcgcttttgccggaaaaaacgacagaaagccatgaatctcccgacggctatgtgtcatgggtgttagcgcagagcggcacgattccgacgatggtttcccataagctcggattaaaaggaccaagctatttcgttcattccaattgctcatcatcattagtcggtctttattcagcctacaaaagcataacgagcggagaatcggaatacgcgctcgtcggcggagcaactctgcatgcagcgaccggcatcggctatgtgcaccaaaacggattgaatttttcaagcgacgggcatgtcaaagcatttgacgcttcagccgacggtatggcgggcggagaaggagctgccgtcattctgctgaaaaaggcgtcacaagccgttcaggacggagatcacatatacgccatgctcagaggcatcggtctgaacaatgacggagcggataaagtcggtttttacgcaccgagtgtaaaaggtcagactgacgtcatccagcatgttttagacagcacgaatattcacccggagacgatttcctatatcgaagcgcacggcactggaacgacattgggtgatccgattgaaatgtccgcgttgcagcaagtgtataaacgttacacggaccgggagcagtattgcgggatcggctccgtaaaaacgaatatcggacatttggatacagcagcaggtctggccgggtgcatcaaagtcgccatgagtttatatcatcgggagctggcgcctaccattaattacacgtcaccgaatccgaatatcaaattcagcggttcgccgttttatgtggcggataagagaaaaccgctgccggagagagagacgccgcaccgcgcagcgttaagctcattcggactcggaggaacaaacgcacacgccatttttgaacagtatgaaaacaaaacgatcagcggatcaaatgacggacagccgccttatatcgttccgctgtcagcgagaaataagcagcgtcttactgcctatgcatcttgtttatccggctttctggatgaagccgaaaacgatgtttccttgcatgatctggcatttacgtatcagaccggacgtgaagcgatggaagagagagccgtttttatcagtcatgatcgtcacgatttgaagcgtcagctgcaggatttcatcaacggcaatgaccaaaacatcttacggggcgaaaaagtgagaagcagagaagtgtcagctcaggagatggaagagcttgcagcatgtcagacacgggatgaaaagctgaaagcactcgcggcgctctgggttgaaggagcgcgtgtcgattggggcttattgtatccggattccgcgccgcaaagaatcagtgcgccgacctacccgttcgcagaagagcgcttctggccggaagaaacggtgaagcaaacggataccaaacttttgcatccgctggtacatcagaatacatccgtcttgcaggagcagcggttcagttcggaattcacgggaaaagagtattttattgccgagcatatcattaaaggaatggcgatcgtgccggctgccgttacccttgagatggcacgggccgcggcggagaaaagcatcggcggggcaacagaggaatctctgggcctgcgcttaaagaatattgtatgggtccgtccggtgatagccgatcaggaggctgtccgtgtccatatcggactttatgaagaagaggacggacagattcaatacagaatgtacgggggtaacgattctatcggtgaagaagctcctctttataatcagggcatcgctgaaatcatccggaaggaaccggaggaagcggcggatattgagcagctgaagcgccgatgcacgcagggaacaatcgaatctcaagcgttttacaaaggaatgattggtgctgattacgggccgggttacaaaggggtgcagcttgtatacaaaggcgaagaccggctgcttgctaaattgaagcttcctgaatccgtctctcatacaaaagctgattatatccttcatccgagtatgatggacggtgcgcttcaggccgccgaatatttgcaaaacgtgacgagagcgctgcttgcagaaagcggggaaccattcaaagccgcattgccgtttgctttagaggagctggacgttctgaatccgtgcgctgatgatatgtgggtgcacgtcacattcagtgcgaacaataaagccggcgatcctatccaaaaagccgatattgatttatatgacaataacggcgggctttgtgtgcggatgagaggtttctcaacacggatcatggaagaaaacgcgggtgccggcgtttcggtcagccgtacggacacattgctcgctgaaccgatctggaaagagcagccggaaccggcggaccacgagccaacgtatgaagagcatattattttcctttgtgagtacgatgaagccgtaaaacaggccgtggaagcaaagcttgaacatgcaagcgtcattatcttggacgatcgtcccgcatctattgcagagcggtatcattcttatgcgggccagctgtttgaccatatcaaaaccataatgaaaagcaagccgaagggccgcgttctttttcaggctgttacgcagtcagcaggcttacagcaggtgttctcaggcattaccggcctcttcaaaaccgcatgccttgaacattccaagctgatctgtcaaatgatcgaagccgaggagaaagaaagtgctgaaggcatagcggaaaaagcgtccgaaaaccgtatgcatgccgaaagcgtccatgtgaaatatgaaaacggcaagcgctttgccgctgattgggaagagatggatatttctcaagcggagccggatattccgtggaaagacgaaggcgtttatctcattacaggaggtgcgggaggtttaggtctgatctttgcaaaagagatcgcaaactgtacaaaagatgccgtcatcatactaaccggccggtccgctctcagagaaaagcagaaagacatgctggaaacagtacgtgctgccggcgcttctgttttctacgagcagaccgatgtcacggacgaagcagaagtataccgattgatccgcaatatccgcaaacggcatggcaggctggacgggattgttcacagtgccggcattataaaagacaactacatggtgaagaagacggcagaggaattccaacacgttctcgctccgaaagtgaagggtcttgtgtatcttgatgaagcgtcacaacatgagaaattagatgtctttattgtcttttcatccttatcaggtgtgcttggaagcgtcggccaggctgattatgcgtctgcaaatgtctttatggagatgtatgccgagtaccgccgttctttacaagccgcaggacaaagatacggaaagacgctttctgtcagctggccgttatggaaagaaggcggaatgcaggcaggaaagcagacggaagatatgctgatgcaggaggcgggaatcgcaccgctcggcacagatgccggcatcaaggctttatatcaaggcttgatgagcgggacagcccggatgacggttcttgaaggagatgtgaaacacatgaaagcaaaactgttccgcaaagagaatgatcatccggaagcagagaccggcgtacgtcatgacattgatgctgacagcctgcttgaaaaagtgaagcatctgttaaaacagcagacggcctcactgttaaaagtaaacattgacaaaattgatcctcatgaagaaatgacaaaatacgggctggattccatctcgatgactgagtttacgaaccagttaaacaaaacgtaccggcttacgttaacgccgacgattttctttgatcatccgacaatccatgaatttgccgttcatttaatcagtgaatacgaagaggaatttgccggacggtttgcggtaaatacaaaaacggttcaatcggcaagaccggtaaaagagactcaaatcacgcgcccggccgttaagcgacgacgcactctgcctgagacacttccgcagacagtgcagcggggccaagggccggaaccgatcgcaatcgtaggcatcagcgggattttcccgatggcagaagacattgaagctttctggcagaacctgaaagaaggcaaagactgcatgaccgagattccgaaagaccgctgggactggcgggactattacggggatcccgcaaaagaagccaataaaacaaacgtcaaccaaggcgggtttattgacggaattgctgaatttgatccgttatttttcgggatttcaccccgggaagcggagcaaatggaccctcagcagcgcctcttgctgacgtacgcgtggaaagcgatcgaagatgccgggtatgcgtcaaagagtctctcaggcacaaaaacaggtgtgtttatcgggaccggaaataccggctacggttctcttttagccaataccgatgcggcgattgaagggtcatccgcggcgaatacaagtccgtctgtcggaccgaatcgtgtcagctatacgctcaatctgcacgggccgagcgaaccgattgataccgcctgctcaagctcgctcgttgccatacaccatgccgtttcttcaattgaagaaggaacgtgcgacatggctttggcgggaggaatcaatacgattgttcttccggatgtgtatatcagttttgacaaagcgggcgcgctgagtaaagaaggaagatgcaaaacgttctctgatcgggctgacggttttgcccatggtgaaggagccggtctctttttcctcaaaaagctgaaagccgctgaggcggatggggaccatatttacggcgttattaaaggaagcgcggtgaatcacggcggccgcgcggcatctttaacaacgcctaacccgaaacaacaggcggaagtcattaaagccgcatacaaaaaagcgggcattgatccgaaaacagtctcttatatcgaagcgcacggcaccggaacagaactgggagatcctgttgaaattaacggcctgaaacaagcgttcagctcgtttgcagacggaaaagagaaagcggccggctattgcggtttagggtcggttaaaacgaatatcggccatttatcccttgccgcaggagcagcgggcattattaaaattttgctgcagatgaagcatcggacattagtaaaaagtctccactgtgagacggtaaatccgtacattcagcttgaagacagcccgttttatctggtgcgggagacgatggaatggaagacgcggacggacgaacgcggaaacgaacagcctcgccgcgcgggcatcagctcattcggcatcggaggcgtaaatgcccacgtcgtcatcgaagaatacatcccagaagacagagaggaagcagatgattttcatatcgacccatgtcttttcgttctgtccgccaaaaatgaaaaacgcctgaaagagcaggcaaaacagctgaaacgtgcgcttactgaaaaacggtacgatcaatcctccctcgtttctatggcatataccctccaaatcggaagggacgccatggaagaacgtctggcggttattgccggatctgcagaagaactgcaggaaaaactgtcacagtttatcactggagataagcatgctgatttgtacagaggaagaatagacaaaggcacgctgcaaatgctgacggaagatgaagaaattcaagaagccgttgaaaaatggatggcacgcggcaaatacgcgaagctgcttgaattatgggtcaaagggctgaacgtcgattgggcgaagctgtatggagaccggccgcctaaacgcatgagcctgccgtcgtatccttttgcaaaagaccgctattgggcggcaaaaagcaccggaaaacacgaaaaaacaagcactgtatctgccggaaaacaagacgcgcttcatccgcttctgcacagaaatacttcaaaccttgcagaacagcggttcagttcaatctatacaggaaaagaattttaccttgcggaccatgttgtaaaaggcgtgccgattttaccgggagtggcacatcttgaaatggcgcgcgcagcaatggaacaggcatctgaagttccggccggacaaggaagcgtcaagcttaagaatacggtttgggtgcggccgatcaccattgaagacgagccggttcatgtcaacatccgtctcattcctgaaacggcaaatgacgttcaattcgacatttacagcggccgggaaacagatcagccgtccgtttacagccaaggggcagtatcagtccgccctgacgccgaggcaccggtcattgatctccaaaagctgagatcacaatccgccgagacaccgttttctgcagatgaagtgtacgatatgtaccgcaaaatcggttttgattacggcccggctttccggggtgtcaaagcgatttatacaggtgatgatttcgtattgggcagactgtcacttgatgcggcttgtgcggacacggtacaggagtatgtcatgcatccgggcttaatggactctgcattgcaggcatcaagcatattaaccggaacaaatgatgaaaaactgatgcttccgtttgcggttcaggagcttgaagtattcagcgcatgcgctgccgagatgtgggtttacgccagactttctgaagaccacaaagccggccagattgaaaaacgcgatcttgatatttgtgatgaaaacggcaaggtgtgcgtaaggctgaaaggtttgtcattcagaatggctgaaaaagaacctgagaaaaaagaaaaagctccgggaacgctcatgcttgagccggtatggacccgaagcgatgaaactgctactcaaacggaaccggtttttgcccggcatatcgtgttgctttgtgacacagacgccggattgaaacaagccgttgaagccgcgggagctgaatgtattgaaatgacctcccggcacgggaaagcggcggcgcgcttccgtgattatacaggacggatattggagacgctgcaaaaactgctgaaggaagagacggatggagacgtcctcatccagacggttctctctaaaacagataagcatcagctgctctcaggcatttcagctttgttaaaaacagccggcctggaacataaaaaactgaaaacccagctgattgaaatagaaccggcggaaaacggcagaatcacagacatcatcagagaaaataaaacacgggctgatgacagccatatcaaatatgaaaacggcatccggtacagcgcagatgtcaaagaaacggccgtgtccggcggcaaaatacgcattccgtggaacgacggaggcatttatctcattaccggaggagccgggggcttaggctttattttcgcgaaagaaatcgcccgcaaagtcaaagagccgacactggttttgacaggccgttccgcattaagcgagaatcagcggatgcagctgcaatcgcttgaatcactcggagcaaaagcggaatacaagcaggctgacgtaacaaacgctcaaactgcggcagacctggtcaaaacaattgagacggaatatggcggccttcacggcatcattcatagcgcgggtgtgatgaaagatcaatatatcgcaaagaaaacaaccgaagagttttacagtgtattggctcctaaaacggacggatttgtcaaccttgatgaagcaaccgagcatttagcgctggactttttcatcgttttctcatccatttccggcgtcaccgggaatgcgggacaggcggattatgcggcggcaaacgcatttatggacagctatgcggcataccgcaacgcactggttaccgcaatgtaccgccacggtcacacattgtcggtcaattggccgctttggaaaaacggcggaatgcaagtcaatgaagaaatggcgaagctcaccgaaaaaagaaccggcgtaacgccgatgcgcactgagaccggaatagaagctctttacaaagcatggagcatggggaaaacaagcgtgctcgtcatggaaggaaacggcgccgtaatgcgggaaaagctgcttcaaaagactcctgcagcagcttttgcaccggttaagaaaacagatgaaacgcctgcgccgaaagacctgacggcaaaacttcaggaattgctggcaaaagaggtttccgggcttctgaaaataaacattgaagaaatcgatatcgaattggagttcaatcaatacggatttgattccattacgctgacggaattcgccaacaagctgaatgacacttatcagcttgatctgacaccgaccgtattttttgaatatgcgacgattcaagccttggcgcatcatttagcagaagactatcaaacacaatttgccggcagcacacagccgaaagaagaaaaacaaagcagcgtaactgatgatggcggcatcagactggcagggaacaaacgatttgcaaaaactgccgtacagcctgttcagactgcggctgaacataaaccggaaccgatcgctattgtcggcatgagcggagtgtttccgaaggccgcaaatattgatgagtattggcgcaacttagaagaaggaaaagactgtataacagaggtgccggcgaatcgctgggactggcgtgagtattacggtgacccgcttaatgaagccaacaaaacaaatgtaaagtggggcggatttattgacggagttgcggattttgatccgctgttcttcggaatttcaccgctggaagccgaacagatggatccccagcagcgcttgttaatgatgtatgcgtggaaggcgatagaagatgcgggatattccgctaaaagcctttccggcacgaaaacaggcctgtatatcggcacggggaataccggatacggctcactgttttccgacctggatatcggcggtgcgtcagccgcgaatatgagtccgtcagcggggccgaaccgcgtcagctatatgcttaatctgcacgggccgagtgaaccgatcgacacggcttgttccagctcgctggtcgcgattcatcacgccgtatgcgccattgaaaacgggaactgcgatatggcgatcgccggcggcgtgaataccgtcgtcacaccgcaaggccacatcgcttatgacaaagccggcgctctgagcaaagaagggaaatgtaaaacattctccgacagggcggacggatttgccgtcagtgaaggtgccggaattctgtttttgaaaaagctgtcagaagcggaaaaagcgggcgatcatatctacggcgtcattaaaggcagcgcggtcaatcacggcggacgtgcgaactccttgacgacgccgaatccgaaagcccaggcggaagtcgtcagaacggcttatgacaaagcaggcattgatccgagaaccgtcacttatatagaagcgcacggaaccggaacggagcttggcgatccggtcgaaatcaacggcctgaaatccgcctttcaaaagctgtacgaaaaaacaggcgatcccgccgtttacgcgagtcactgcggtctgggatcggctaaaaccaatatcggccacctgtcactggcagcaggtgtcgcgggtgtgatcaaagtgctgatgcagatgaagcataaaacacttgcaaaaagcctccacagcgaggtcatcaacccgtatatcaagctgaaagacagtccgttttacatcgtacaggaaaaaagagaatggacggcattgaaagacgaaaacggcaatcttctgccgcgccgtgcgggaatcagttctttcggcatcggcggcgtaaacgcccatgtcgtcattgaagaatatatcccgaaggaagaaagaaaaacagctgttttcacacaccctcaaatctttgtgctgtcggccaaagaagaagaacgtctgcaggaacaggcgcagcagctggcgcaagcttcttttacggatgcggatcttgccgatgttgcttacacgcttcagcaggggcgtgatgccatggaagaaagagcggccattatcgcttcctcggctgaagaactgcgggacaagctaaagagctgtgcgaaaggacgttatgatatagcgggcatttataaaggaaaagcgggtaaaacctccctgaaatccattctggcaggcgcaaacggggaagcggatatcgaagagctgataagccgccgagagaatgacaagcttgcggaattatgggtgcagggcgcggatatcaaatgggacggcctatattctgatatcaagcctcaacggatgagtcttcctgcttacccgtttgcgaaagagcggtactggatcacggacaatcggccgaaagcagagaaaccgcaagctgtgccgacgtcgcaggtgctgcacccgctgcttcacgaaaatgtatcagatttaacagagcagcggtaccgatccgaatttacgggacaagagacgattttcaccgatcatcttattaaaggcaagccggttatgccgggcgttgcctacttggaaatggctagggcggcggttgctcaggcagtcaaagggcaaaaggaacgtccttctgtcacccgcctgaaaaacatcgtttgggttcggccgatcgaagcgggaaaccgcccgattgaagcggaaatcagcctgaacccgagggaaaacggtgaaatcgtgtatgacgtttacacggattcacaaacagaagcaagcggcaggcagatacactgtcagggggctgccggcattctcagcgccggggaggctccgcaccgtgatataggcgcactgaaagctcaattcggcctcagtatactgacttctgaacagtgttacggcttattcagcaaaatcggcattgactacggtcccggacaacaaggaattcagcagattcatatcggaagcaatcaagcgttagctgagctccggctgccttccttcctcgaagaaacggcagatcaatacgttcttcacccgtgtatgcttgattcagctttgcaagcgacaatcggactgaagctgcacgcagatgataaccagctgtcactgccgttcgcccttgaagaactggacattttcagcccgtgcacgacaagcatgtgggcgtatgtcagctcccggggaacggatgaaaaaatacagcgtatggacattgacttatgtgatgagacaggccgggtctgtgtcagaattaaagggatttcttccagaatgatggaaggcccggcgccggaaacatcattaaatggagcaaaccttctggctccggtgtgggatctcgcggaattccgtgatcaaagcccggcatataagacggaagaggttgtctttatcgcgggggatgaggaaagcgcggcttttcaattgcatcatccttctgcgaaacggcttcatatcaaccaggaggatgaaatagaggctgttgcggctgaactgaaagcaacagggtctttcgggcatatcgtatggatcgctccttttcacagcgctgatgacatggtaaaagctcaggatgcgggcgtcattcagatgtacagagtgattaaggccatgcttgctttaggatatggaggcaagcgaatcagcttgactgcagtcacaataaaaacacagtccgtacagccggcggacattattgatccggctcatgcaggcattcacggtttggtcggctcgctcgcaaaagagtatccgaactggcaaacaaggctgattgatgccggatgtccggaagatgtttcaaaggcggagctgttctcagcgccgtttgatgagcaaggcaatacatgggcgtaccggaacaatcactggtacaaacagcgccttattcctgtacagcagccggtgtcaagccggcccgcctaccaaaaaggcggcgtttatgtcgtcatcggcggcgcggggggcatcggcgaggcatggagcgaatatgccgtgaaaacgtatcaggcgcgagtcgtttggatcggcagacgaaaacataacagcgccatccaggaaaaaatcgacagactcagccaattcggcccggctccgatttatattgaagctgacgcggcaaatccgaatgagctcacacgggcgtatgaaacgatcaaacgcacgcacccgcaaattaacggaatcatccattccgcaattgttttagaggatcagagcctggcaaatatgccggaaagccgtttgaaaagcgtgctcgctgcgaaagtcaatgtcagcgtgaatatggcccgcgtgttccgaaatgagccgctggactttgctttgttcttctcatctgttcaatcatttgcacgagcggccggacaaagcaattatgctgccggatgcagtttcaaagatgcctttgccgctcatttggctcaagttcggccgtattcggcggcagtgatgaattggagctactggggcagtgtcggaatcgtatcatctgccgactatcaagaacggatgaaacaggcgggagtcggatcaattgaagcgccggaagcaatggcggcgcttgaacgattgctcggcggcccgttgaatcagttcgtcatgatgaaacaggcggaagagccggaggaaaaaccggaagaaatgatagaagtataccctgaacatcacggctcggcgatgcaaaaactgcgaagctatcagcctaaagtaacaagacatgtacaacaattgagttaaggaggggacggctttgcaaaacactgaagatcttctttacaaactattggcaggccagctgaaatctgtcggattttttacggaaaacgaaacgcagcctgtcatgcaggggttttacggcaggtggctggaagaaagcatctccatcttggtgcaaaaaggctttttgaaacagtcaggcagtacgtatgtgttaacgggtccgatagagcgtgcggacgttctgtggcaagaatgggatgaaaagaaagctcctttactcaaggacagcagcaaacaggcgatgatcaccttagtggagaccgctctcagagctttgccggatattttatccggcagagtttctgccactgatgtcctgtttcctgattcctcaatggaattggtggaaggaatctataaaaacaatgaaacggcagactactttaatgaggtgctcgctgacacattgacggctttcattgaagaacgcctgaaagaagacccgaacgcggaaatccggatattagagatcggagcggggacgggcgggacgagcgcggccgttttcaaaagattaaaagagtacaaacatcatgtgaaagaatattgctacaccgatctgtcaaaggcctttttcatgcatgctgaaaaagaatacggtcccgacaatccgtatttgacttataagcggtttaatgtggaagagcccccggctttgcagggtatagaggcgggcgcatatgacgcggtaattgcggcaaatgtgcttcacgcgacaaaaaatattcggcggacacttcgcaatgccaaagcggtgcttaagaagaatgggattttgctattaaatgagatcagcagccattcggtttattctcatctgacattcggccttttggaaggctggtggctgtatgaagacgccaaactgcgcattcccggatgcccggggctgtatcctgaagcgtggcagtctgcgctggaaagcgagggatatcggtacgttacatttatggcggaatcgtcacatcacctcggccagcagatcgtggcggcagaaagcgacggtgtcatcaggcaaaagcagccggacgcgcaggcggttgaagaaactgcggcttccaaagagccggctgatttcacagaaccgtctttctcagtcacagaccggactgtgcaattcataaaagaaacgttagccaagtccataaagcttgctcccgagcgcattcagccggaaaccagctttgaaaaatacggcatcgactccattttgcaggtgaattttatccgcgaactggaaacattgacgggcgagctgccgaaaacgatcttatttgaacacacgaatacgaaagaacttgccgggtatttgctggaaacttacccggataagctgcaacaggcattcggagccgaacaagcgcctcctgaaacaaagcatccggaacctgcaatgaatgaaccggtgccgcttgtcacggaaacgcggcgatttatcaatgaacaaaaagagccaaaagcgccaaagccggaaacagaaaccgtcaccgttaatcgttctgatcgtgacgacattgccattatcggcatcagcggccgctatcccgagtctgaaaccctcgatgagctgtgggagcatttaaaagccggagacagctgtattacggaagctccggaaaacagatggaaatccggtcttctgaaaacaatggcaaaagaaacacgaaaagaagaacgcaaaacacggtacggcggatttctgcagcatattgacgattttgaccatcacttgtttgacatccgggaagaccatgtgatggagatgacgcctgagctccgtctaagcttagaaaccgtatgggaaacatttgaaaatggcggttactcgttagaaagagtaaacgaatggcaggaatcagacagcggcatcggtgtatttatgggcagtatgtacaatcaatatttctggaatatcccgtcattggaaaaagctgcgctcagctctaacggaggggattggcatatcgccaaccgcatttcccactttttcaatttaacgggcccgagcatgggcgttacgaccgcatgctccagctcactgagcgccattcatctcgcctgtgaaagtctgaagcttaacagctgttccatggcgattgccggaggggtcaatctcacgcttgaaccgtctaaatatgatgcgctcgaacgggcgaatttgcttgaacagggaagtgaaagcaaaagcttcggaaccggcacgggcctgatgccgggagaaggagtcggggcggtgctcttgaagccgctctccaaagcgcttgccgacaaagaccatatttacggggtcattaaaagcagcgcgttgtgccatagcggcggaaggcagatgtacacggctccggatccgaaacagcagacgaagctcatggcggcttccatcgaaaaggccggaatcaatccggaaacaatcagttatgttgaatcagcggcaaacggctctgtattgggagacccgattgaggtcattgccctgacaaatgcgttcgcgcaatatactgataaaaaacgtttttgcgcgcttggatccgtcaagtcaaatctcggtcatttagaggcggcttccggcatgtcccagctcgcgaaagtgctgctgcaaatggagcgggaaacattagtcccgacgattaatgcaaaaccgcaaaatccgaatatcaaccttgaacaaacggcttttcacctgcaggaaaaaaccgagtattgggagcgtatgagggatgccgaaacgggggacatcatcccgcggagaagcatgattaattccttcggggcaggcggagcatatgcaaatctcatcgtagaagaatatatcagcccgaattccgatcaggcccgtcacggcgatgaggaatatattttccctgtgtcagcgaaaacaaaatggagttttgaagcctatcttgacagactggcggcctttttagaaaagacgccatctcttcatccggccgccatcgcatccgcgctgcaaaaaagaacgcatcattcggagtatcgggcggcatttacggctgcttccgttcaggaactgctggaaaagctggccgcttaccgcatggatcagcggaatctcaatttctctgaatctgatattggccggcgtgcgcggcaatgggaaaaaggagagaatatcgcgtttgatcagttgcagcaagagcacgccgttcatctgccggcctacgcttttgaccacgggacttcttttcaattcggtgaatcagaaaacgctgccggcgttcaggcggtatacagtgatgacgacccatacgtgaaagggcatcaattcagcggagaaacggtactcgtcggcgctacatataacagtctggcagtcgatcatttttgtgatctttttcctgaagcggaaggaggacaaattaaaaaactgaattacgtcagccccattaccgtaaaaaaaggatatcgcatcgagctgaaaacagaatcgaaacaaaacggggatggatttgaactgagcataatgcaccgcagccgcacgtctcctgattggagcatagcggcgtatgccgagtgcagcccctatccgtttcaaaagcagcacgcggatctggcggccattcagcaatcttaccgggaagtgggccggatagatgagttatacggagacggaacgggaaccgtcgtgtggggagaagaatttaaaacgatcacccgcctgtacaaaggctctgatgccgttttagcgaaagtgaacctgaacaatagcgactcacaacaagcgcatcattatgccgtaaatccgttaatcgccaacagtgcttacttggcctcactttctttattggatcaaacggaggcggaaagctatctgccgttcggcattaattccgtcaccttcagcagccctgaagatcttaccgattgctggctgcacatcaagctgaccaaacaaacgggggaaatgattctgattaacgcagatgtcatcagcagccgatcggaagtggtgatgcgttttgaaggctatgccctgaaacggttccgcccgaaaaccgaacagatgaatcagccggcccgaacggctgttaagaatacgggggcaccgatttctgccggcagtctgacagatgatatccgcagctacgtccttggcaagctcgccaagatgatgggtgaacccgggccatctcttcgttctgacgcgaatatcatggaattgggacttgattcagcgagcctgatcgggctgacaaaagagatcggccaagaggcggacatcgatgtgaatccaacattgtttttcgagtatccgaccgcggaggagctgacccgccacttcgcgtcagcatatgagagcaagttttctcaatttcttgccgatcataagcattcagaagaggccagggtcacggaaacagaagagcgcactttaccgaagaaacagcatacgccttgtgataacgccgatatcaagcaaggaatcgcgattatcggtatgtcagctcagtttccgcaatccccggatatccagtctttttgggagcacatcgtaaacggggatcactgtattaccgaaattccggcggaccgctgggactggcgccgttacgccgatgatgagaatgacacgagtctcagatggggcggttttattgacggtgtcggcgaatttgacccgctctttttcggaatttcccctaaagaggcatcacaaatggggccggagcaatttctgcttttgatgcatacatggaaggcaatggaggatgcgggcctgacaaataaggcgttatcaagcagaccgacaggcgttttcgttgccgcgggcaacagcgatccgaacaatggaacagccatcccgtccatcattccgaacagaatatcatatgccttgaatttacaaggaccgagtgaatattacgaggctgcctgcacgtcaacgctggtggcattgcacagggcggttcaatcaatccgtcataacgaatgtgagcaggctgtcgtgggcgccgccaatattctgcagtcgccgaagggttttatcggttttgattcaatggggtatttaagcaaaaacggccgggcgaaatcgttccaaaaagatgccgatggctttgtcagaagcgaaggggcgggcgttatcatcatcaaaccgcttgaggcggcaattgaagacggcgatcatattcacatggtcattaaaggaacaggattgtctcacggcggtaaaggcatgtcgcttcacgcaccgaatccggcgggaatgaaggccgcgatgaaaaaagcgtacgaagacaccgatgttgatccgcaaaccgtcacttatattgaagcgcacggcattgcctccgaaatggcagatgcgctggagtttaatgcaatcaaagcgggttacggcgagtctgcaaatcaagaggaaagcgcgccttgttatatcagcaccgtgaaaccttgcatcgggcacggcgaactcgcttccggactggccgcccttataaaagtggcgatggccatgaagcatcataccatcccgggcattcccggatttacagctgcaaatgagcaaatggccattcagaaaagccgcttccgtttcaccgaagacaatcaggaatggacacagctcaccgaccatacgggcagaccgatcccgcgccgggccgcaattaacagctatggcttcggcggcatgaatgcgcatgtcgtcttggaacagtacagcccgagccataaagacaaagaatctgtgcatgaaccgcagcttatcgtgctttctgctaagagcgaagggcgtcttaaggcggccgcaagtcagctggctgattttgtgcaaactggagatactccgtcattgcgggatattgcttatacgcttcagaccggccgtgaggcgatgaactgccgcctggcactcgttgcccgcaatcaagatgaattgctggaaaaactgaaagagtacagagcattttccgaagaaagcaatggaatgaaaagcttctttacaggcagtcagcagactggatcaggagatatcggcattttactggaagggactctcggtacagtcgtcacggagacgctgttggctgaaaacaatctcgaaaaacttgcattttgctgggtgaaaggtgcggatataccgtgggacagactccaccaaggcaaatctgttcaaagagtgccgcttccgacatatccttttgaaaaccataagtattggaaaggcggtcagccagaagacatcagccttgcaccggtttcacaggaccctcagctctgccgcgagagcgcagctgacattgtggctgacattctggggatgaaggcagcggaaattgatcaaaataagccgctgactgaatacggcttcgattcaatctcctctattcagctgttgaaaaaatttgaggacggagacagccgcatcagtctggaggctcttcagaaatgcagcactcttcaggagatcggcatgctgttaaaaacggaccaaccacaggagacgggccggaattttcccgaactcgtcaagctgaatgaaagagaaaaaggccgtcctgttttttggtttcacggcggaacaggaggcgtggaagcataccagccattcgccaaaaagagtcagcgacctttttacggcatccaggcaagaggtttgacagggaaagagccgctgcaaggaatcgaagagacggccgcttcttataagagaatcatccaagcggtacagccgaaaggcccttatgatctcggcggatattccttgggcggaatgcttgcatatgaaaccgcgcgcctcttgcaggaggaaggtcatacggtaaaaagcgccgtcatgatcgacactccgtacagtgaaaaatggaaagaaagaaaaccatctgttaagtcagtcatgctgcaaacgatcaatacgatgcttacagcatatcttaagcctgaaaaccttgaagaggcattaatcagcagagaagacattaccgcccaggctgaggaagaagaagtattgaaagaattgatcggccttgccaaaaagcgcggtctgccaaaatccgaagaagcgatccggatgcagctggagcaaatgatgaagacgcagctcgcttacggaatggaagagtatgacatgaagccgctgcctcatccggaagcgctgcaatgctattacttccgtaataaaagcggtttgttcctcggagatcttgaacgttatctgacggcagaggaagaacaaattccgttagaccatgatgcgtattggaaagaatgggaacaccagatgaaacagtttcacctgctggacgttcactcttccaatcatgtcacaatgctgtcggaaccgaagccgcaaaacgccattaaggcattctgcgaaaaactgtacgcaaacaaaggaacgataagcgcaaatttccttaaatctttcagaaaaaagctggacgaaacaaatgagttggtaaaacggtaatagagaacggccggagcaatccggccgctttttttatctatatagaactaaatttactatgtactaaattttcattgttgtattgatttctgtttataagacattaaaaaaacccccgataaacagggggcgctattaaaatctgacaggcaatgtttcaagccctctcaaaaacacattttttctccatgttacatcctcggccgcgcctttcagctctatattcggaaaccgttttaaaagcgcagtaaaggcaatggatgcttccatccgggcgagcggagccccgagacaaaaatgaatgccgaatccaaaagagatatgacggttcggtgttctcgctgtatttaatgtatcaggatcatcaaaatattccgggtcccgattggctgaaccgatgccgataaatatcatatcgccttttttaatagaaacatctttaaaagtgaaatcttcaatcgcccatcgatttgccatcatgatgacgggagaggtataacgcaaaagctcttcgaccgccgtctggatattttccggctgccgctttatcttctccatctggtctttatgcagaagaagcgccagggtgccggagccgagaaggttaaccgttgtttcaagcccggcaacgactaacaaaaacagcatggaatacagctctgattcactcagcttttggccgtcctcttcagcgtaaataagcttgctcgtcaagtcttcacccggatgttttcttttttcttcgatcagtgttttcatatattgtttaaattctttgagagcctggttggtcgcatcttgtccgctttctgacgtgtcgaccattgcgtttgtccacacttgaaatttggcgcggtcctctttcggaattccgagcagctcggaaatgacgataaacggaagcggtgcggcgaaatctctcatgatatcagggtctgcttttgtttccatttcatccagcagctcttctgtgatctgctctatcccggtgcgaagctgctcaatcatccggggagtaaacccctgatgcaccaaagatcgaagtcgtgaatgatccggggggtcttttgccagcatatgctctgagacaaaatcgatatcttcactgacattcagcttcgcgatcagctccttcggcatgactcgttttacatctctcgtaattctgccgtctttcaaaaacgccatacaatcatcataacgcgtgatgagccaagccggaaaggtgcctccaaaacgctgcagttcgaatttatgtatggggtcctgctctctgaatctgcttaaaaccgcaaaagggttttcgtgaaactcgggtgagtgtgggtgaaacattgttttttccatctggatttccccgccttcatgtttttgaaacgacataacaaacagccggtgcctgccgaccggacggcattcctccttttatctgccgaagacactgatcacaacggctcataagtatgtctaaaatatataaggaaacagtagccggttcaatagacaaatcgtaaagccgccattttcgttgattatcaacaaaacagcaaactttttttgccatttcatcatgtgtgttaaatccggctaatatacatatttacgcttcatatcaacttctaaggaggatgtgaatgaatgcgtttatgaaatgggcggcaagtctgcttttggtgatctctcttcagttcggctttacgggcgccggcatccattcggacagtgctgctcgtgccgcatcccgatacgatcaggtgctgtatttcccgctgtcaaaatatccggagacgggaaatcatataaaagacgccatttcggcaggtcattctgagatttgtacaattgatcggggcggagcggaaaatagaaggaaagaatcattgaaaggaattccgacaaagcccgggtttgaccgtgatgaatggcccatggcagtctgcacagaaggcggggcgggggctgatatcagatatgtaaccccgtcggataaccgcggggccggttcatgggttggaaatcaaatgagcggatattccgacggcacgagagtattatttatcgttcagtagcttctccggttcgccggagtttttttatgctctgaaaaagcggcacgccggctggacatatgaaatggcaaagagtaaacttattatttggaatcagcatgagaaaggattggatcacattgacagtgactacataccgaaatattgcacttttacttctttgtttaacagcgggaattgtggatgtgatcggttatttaagcctgggacatatctttaccgccaatatgacggggaacatcgttctgttcggcctggcggtcggcaactcatggcaccttgccgtactcaaatcgttaacctcgttaatcggatttattgcgggcgttattgccgcggccctgcttgtaggcaataaaaagaaatcattctggccccctgcggtaactgccgctttagctattgaaggagctgttttgctgctgtttgctttgttctcctgcttttttgcagatgccatttctgtttatgtgctgattatgctgctcagcttcgcaatgggaatgcagacgacagccgcgagaaaacttggtgtagcggggatttccacgaccgtattaacgggaacgctcgctaatttttttgaagatctcaccgcaaggttttacaaagcggacaagcggaagcagtttacgagagatgctgtattgcgcgcgcttgccttggtgctgtattgctttggggcggttataggcgcttttgccgaaccggattataagtttgccgtgatctggctcccgattatcattattttaggcattatgctttgcgcattcacgatgttccacggatattcagaagaaaaaaaccaataaaaaaacgccgctgattcagggcgttttttctttttattgctctttccgggtcccgattgtataaacggcccgatctgtatgtacctttaatccgtcttgctccttttggatggtgatgtcaccgagcagagggatttcatacgcatcttggggaagcgggacatttccttcctccgtataggttgtgccgtgcccttttaagacgagttcttcgtccgctacatagtcatcgggatggtttgtccggcggacgagaacatcatcaaggtgaagcatgatctggtccatatcagaaatctcgtttcggctgtctgtcagctctccttttctgatatcaagcgtttgtccgatctgtttttgcagccattcagacaattctgtgtttgtaagtgccattgtgattcctccttttatctacaccatacttattccctatttttttagaaatacactgccttgcattgatctttttttctgacagccgatttgtgaagcgttccgagtttcttcattataaatgtttcatctgttcacctgaaaaacggagtcatctgcaggtgcagacgactccgttctcatgataaaaaggttactctttcggcacggcgttttcagcgtttactgcgcccgctccgtaaatgttcggatcttcatttgtccatttatccggactttgtttgatcagtgttttcacttcgtcaggcgaaagctgcgggttctgctgaaggattaaggcggcaatgcccgcacagatcggagtggccatggacgtgcccgacagactgaaatacaaggagcctacacggtttgatttctgtaatttatcaaggtatgaacgcggagaacggagagatacgatatcgaccccgggcgcaagaatgtcaggcttctcttttccgtacaccgtcgggccgcggcttgagaaagaagcgaccgtatcgtcctcattgccggccgtatcattgtcatcataggcgcctaccgtgatgaccttctcgctgacaccggggcttgaaatcgtttgagcttccggaccggagttgcccgcggcgacgcagacgacgattccttcattccatgcctcttcaacggccttgacgagcgggtcgtccgtttctttatcatatctgagcgcatctccgcccagtgacatgctgatgattctgatcggattctttgtgtgttctttattatattgtatgcaccattccacaccttcaatgatatcagccaaggttcctgatcctgatttgtttaataccttgactccgatcagatcggcttccggcgccggcccctgatatttaccggaagatgaagcgccgctgcttgcgatatcaccggcgcaatgggtgccgtgtccgttgtcatcatacggttctgtcttttggttgacaaagtccgcaaatccgataactctgccttctaaatcgggatgctgatagattccggtatcaataacggcgacggttacgccttttcctgttaatacggtgccgttacgggtcacttcttttgcatgagacgattcagctgccgtatcaaggagcgcttttacttcacggtttaaatagattttacggatatcccggcattgcgaaagaagcatgtgaagggcggacggagtgacttcggcgctgcagcaattgattgtttgaaactgcttttttatggtgcagcgtttttcttttgataagacctgtcctgtgctgtgaaaaccggattcatggcagccctcttcaaattcaatgatgactgacattttctttctgtttttcacctttttttcgaaaaacttgtgcaaaaagcaaggtgtccatttgaaaggtttatataactgtaatacgttttctctgagcggccagtccagcttatgagcatttgaccgcaccatttgtaccattgagtaaccaaacatatatacttttcctcccattctggcgattctctctataccatatgaacaggccgtatgttcggtcagtttgtttgtccttcaggagcgctggttacttgcggctttttcaggagaagaaatcgagttgaaacagaatgtttgttcgtttataatgaagccggcggaaggaggtatatacatgaacataatattgagacattccttggaaaaacagcttccgattgatattatatatatgaaaaaagacggttccatttcaaaacggaccattatgataaaaaaaggggatgagcgggctgtaacggcattttgctgtacaaaaaggcagatgagaacttttttgacgggctccattctgtcctgcgcatttgcttcgggaggcggatattcatttttaaaagcgtattcttgatgccgtccgtttccggccgtgaatctcccgcccctgaaaattcgggcgttcctccctttttttttgccctctctcaaccttttttcactgatgcccggcatttgagcgcttgaaccgtgacaatccattgatttttcgaaaccgggaagtttttcactgatgataatgttaatagaatgttaagataagacctattgacaaaaatccatataatgaacatgtcatttttcagaaaggagcaaagaaggagagctgatgaaaagaattttacttaatgtcatcattatcgtagcaatggtcttactaataagatgtgctcattatgcgtcagaccctgatccctcgaattcttctgatacatacacagattttaaagatttggctgaacatgaagaccccgatgattatcatatatcgtacaataagcgaaaggggagccccgtattgatcatgtcgccgcacggagggagaattgagggcggggtgagcgagatcgtccgctctttcagagatgattactcaacctatctgtttgagggattaaaaacgcatgataaccagactcttcatattacgagcaccaggttcgatgagccttcagcagtcgaaagcattaagcagcaccattatgttatcgcagttcacggttataaaggcgacgagaaaaatactcttgtcggaggaagcgaccggaagcgggcgaaaaaattggtgagagctctcgaacgaaacggattttctgcagaattggcaaccacaaaaaccggtctggccggggttgacaccgaaaatatcaataaccaggcgcaaaccgggctgagcatacagcttgagatcagcagagaacagcgggaagcgttttttgataattttgattaccgcgaaagggaattcacaaaaacggaggaattttaccggtttgtccgtacgataaaaagagtgatcaatcaagagtattcgtaagcttaaaaaaagacaaacgagtgaaagatgagtaaactgaaaaaaaggaggtttgtcccttggcaaaacatcacttttatttaaaagcaaattggcccggaaatcgcaatgacgtcggcgatattaaaagcggccggctggaaacggctgtgtccattcctaaggaaatggacggacccggagaaggcacaaatcctgatgaaatgctgcttggagcggccgctacctgttatattataacgcttgcggcgatgatggaaagaagcggcctggataaagaagatctgcatatggaatctgaaggaattgtagacgtcacgaacggtgtgttcacgtaccagaaaatcattcaccgtccgtttatattattaaagccggatgcagccgaaacggactttacgctcgccaggaagttagcgcataaagcagagtcctcatgtatgatttcacgagcggttcaaggaaacgtggagatggagcttgaggttgaagtaaaagctgcccgcgcttgacgagttcaaacggtcagctccgggccgtttgattttttttagctttttgagacttggaacggttcagcaggatgacgcccgtgatgaccaaaacaagcccgatcatcattttgactgtcatggcctccttaaaaacaaaaaagccgacaattgccgttaaagcggtgccgacacctgaccatgtcgcgtatgcggcggataaatcaaggcttttcaatgagaagctcaaaaacataaaagaggctccgattccggcaatgacgccgagagcgggccacaggtgcgtaaaaccgtccgacagcttcagcatcgtgctcccgaacacttctgatacaatggctaatgccaagcaaagtaatcctttcatcagcatgcctctcctttctaccaattcatcaaaatgacaccggccaataagaaaaagagtccgatgacggcctgcttgtccagtttttcatgaaaccatttcgctccgataatggatgcgagcaccgttccggctccgctccatgttgcataggataagctgagcggaatgagattcagtgtcagtgaaagcatataaaaggccaatgaatagcctgccactacaagcgcgctcggcaaaaaccgcgtaaatccgcgggagaccttcagcatggccgcgccgattgactctgataaaatagcaattgtgaggaagatataacccagaatcatatcaaatccccctctcatcataatccttatgccttttgtttaaggcagtaaaataaaataatatccgaactttgcccgccaagtcaagacattaggcctatacaaaaaggcccccggggaggagcctttttgattcgtcaatagtaatacggataacctccgtacggatagccgtagccgtaacctccgtacaaatacggattgaacaaagcgcttccgacaagccccccgacaagccctccgacaaacggtccgccgtaaaaaccaaacggccgtccgaacccgccaaaccaagggcggccaaaccaaggccggccaaaaccaaaacccggccgtccgaagccgaatccgaatccgggacgcccgaatccgaatcccggccgtccgaacccaaatccgggccgtccaaactgtctcatatcactatctgcttcgtatgtgtattcttcattcataatttaggtacctccaagaataaatttgagatgataacagagtattcagcccaccaatttttgattgggcgtttatcaaaaaaataaaggagtgagcttttgtgggcctgtatcagtccgattggtcaaaaaaacctccgcacacacacgcataccgggcggttacggatgtagtgcaggggcattaccatttgattgaaggcttttcgcagccggagaacggcagcaatacagataagcatacacatttctatacgggcatcacctcgtttgaaaacggccattttcataggtattacggcatttccggccctgccatcccgagggttgacggaacacattaccatgagctttcagagaccacctttgccgcctacaatgagccgattcagatccagcacggcggcgtcgtttacgatccgcgggaggaaggacggaaaacgcaccgccatacgctcaaaggaaaaacgagagaggttgtcggaaacgagccgatcgggtggtagcggacgtttagcgctcaggaaaaagggcaaaatggataggtgcctgaagaaatgaatgctataattagggggagatttataaaagagagtgatacatattgaaaaataaaaaacagcctgtcgtcatactcgtcggaccgacggcagtcggaaaaacaaaactaagcatcggactcgcgaaaatgctgaatgcggaaatcatcagcggagattccatgcaggtatataaagggatggacatcggaacggccaaagtcaccgaagaagagacagaaggcgtgccgcatcacctgattgatattttggagccgtccgacactttttcaacggcggattatcagaaaatggtaaggggaaaaatcaccgagattgccgatagaggaaagctgccgatgattgtcggagggacgggtctgtacattcagtccgtgctgtatgactatacgttcacggaaaactccggcgaccctgtattccgggagcgcatggagaaactggcggctgaagaaggggcggaagcgcttcatgccaagcttgcggcagccgacccggaagcggcggcagccattcatcaaaacaatacgcgaagagtcatccgcgcgctcgaaatcttgcatgtatcgggaaaaacaatgtcagagcatcttaaaacccaaaaacgggagctgctttacaatgctgttcttatcggtcttacaatggacagagaagtgctgtacgcccggattaacgagcgcgttgacctgatgctggaaaccggccttcttgacgaagtaaagcggctgtatgatatgaatatacgggacagccaatcgattcaggcgatcggctataaagagctgtatgaatatcttgatggaaaagtgccgctccctcaggctgtggaacaattaaaacaaaattctaggcgatatgcgaaacgccagctgacctggtttcgcaataaaatgcccgtttcatggacagatatgaccccgcctgttgatattgagcagaaaaaaaaggaaattttcaagtgcatagcaggaaaactggaaatttaatcgaaacagtattgtattgagaaccaaggaggacgaaacatgaaaccgattaatattcaagatcagtttttgaatcaaatccgaaaagacaatacgttcgtcacggtgtttttactcaacggcttccagcttcgcggccaggtaaaaggctttgacaactttaccgttttgctcgaaacggaggggaagcagcagcttatttataaacatgccatctccacgttcgccccgcaaaaaaacgtccagcttgagcttgaatagactttttgaaaaaagaccatgaacaatggtctttttctatgcgcatctgtatattgcaggctgtatatcggaaacataaaagggggttcggaaaatcgtgttcgaaagtgaaaatgaactgagaagaatcagaattacgctcgtttggatcgctgtttttttgctgtttggagcttgcagcaatcatgagacggtggtgacggatgatgacggcggttcaacggataccgaaccgcagacagaaggcatggtgcagctggaacataatcgtttcggcatcgttgaggacggttacttaaaaatataccgctatgatgaaaaaacgaatagaatcgaactgaaaaaagaaacggcgctggatgagcttgaataaatttcacaagcgttcgaatttacaaagcgggccgcacaagctacactaagtactgacattgatcatgcagagggtgagacgattgaaacacaaggtgataatcaaccattgggaagaaacttgtgaagatgattcctgctatgaatatggaaccagcatcatcgttgacggcaaagaactgatcagagaggcttccatcacaagcgctctgaaagccgtactgaaagaaatcggtgctgatgtggagattgaagaaaccgttgaaagcgaaaaaaaatgtgattcttacaaaaaataagaataaaagtctagactactaagcagttttttttcatgttatgatagacatcggcttacacatgacaccttgagtaggatgagagatgattctcgttctgctctcttttttgggcgttaatcgggccagagccaaagtccgctctttcaaaaatatgaattttttataaatcgttctcaatatgttgtgtttttctgagaggttagtatactatatatagtgttaagagattcattatttttgataggtcgtgataaggatggttcaaatcatatttgattcaaagacagggaatgttcagcgttttgtgaataaaacagactttcagctgatccgcaaggtggacgaaacggaccacgtggacactccgtttgttttggtcacctacacgacaaacttcggtcaggtaccggcatcaacacaatcatttctcgaaaaatacgcccatctcttattaggagtcgctgcgagcggcaacaaagtatggggcgataactttgcaaaaagcgccgataccatttcaagacaatatcaggtgccgatcttgcacaaatttgaactcagcggcacatctaaagacgttgaattgtttactcaggaggtagaaagagttgtcacaaaatcaagtgccaaaatggatccagttaaataacgaaatcatgatccaacaggatggaaaattccagtttgataaagataaagaggctgtacatagctattttgttgactatatcaatcaaaacacagtttactttcacgatttaaaagagaagctggattatttgattgaaaaccaatactacgaagaggaattcttaagcctttactcttttgaagacattaaagaagtgtttaagacagcttacgcaaagaagtttcgttttccttccttcatgagtgcgtttaaattttataatgactatgctttgaaaacgaatgacaagaaaagaatcctcgagcgttatgaggaccgaatctcaatcgtcgcgctgttcttcgcaaacggcgacactgagaaagcaaaagaatatgtaaacctgatgatcaaccaggaatatcagccgagtacaccgacatttttgaatgccggcagaaaacgccgcggagaactggtgagctgcttcttgctcgaagtcaatgattccttaaacgatatttcacgggcgatcgatatttccatgcagctgtctaaattaggcggcggggtttctcttaatctgtccaagcttcgcgcgaaaggcgaagcgattaaagatgttgaaaacgccacaaaaggtgttgtaggcgtcatgaagcttcttgataatgcgttccgttacgctgaccaaatgggccaaagacaaggctcaggtgcggcgtatttaaatattttccaccgcgatatcaatgattttcttgatacgaaaaagatttctgcggatgaagatgtgcgcgtcaaaacgctttctatcggtgtcgtcattccggataagttcgttgagcttgcacgtgaggataaagcggcttatgtattctatccgcatacgatttataaagaatacggccagcatatggacgaaatggacatgacggcgatgtatgaggagcttgttgacaacccgcgtgtcaaaaaagaaaaagtgaatgcgcgcaaattgcttgaaaagcttgccgttctccgttctgagtcaggttatccgtacattatgttccaggacaacgtaaacaaagagcacgcgaataaccacgtatcaaaagtgaaattctcgaacctttgctctgaagtgcttcaggcgtcacaggtttcggcttacacagattatgatgaagaagacgaaatcggcttggacatttcctgcaaccttggttcattaaatattttgaatgtcatgaaacataaatcgattgagcgcacggtgaaactcgcgacggattccctgactcatgtatctgagacgacggacatccgcaacgcgccggcagtcagacgcgcgaacaaagcgatgaagtccatcggtttaggcgccatgaaccttcacggctacctggcccaaaacggcatcgcgtatgaaagcccggaagcaagagatttcgcgaatacgttctttatgatggtgaacttttattccattcagcgttcagctgagcttgcgaaagaaaaaggcgaaacgtttgagcattatgaaggctccacttatgcaacgggagaatatttcaataaatacatcgaaaaagagttctcaccggcatatgaaaaaatcgctgcgctctttgaaggcatgcacattccgacaatcgaagactggaaagagctgaaggcgtttgtcgccgaaaacggcatgtaccacagctacagactgtgcatcgcgccgacaggttccatttcctacgtccaatccagcacggcgtccgttatgccgatcatggaacggatcgaagaaagaacatacggaaattcaaaaacgtattacccgatgccggggttagcgtctaataactggttcttctacaaagaagcttatgatatggacatgttcaaagtggtggatatgatcgcgacaatccagcagcatatcgatcagggaatcagctttaccctgtttttgaaagatacgatgacaactcgtgatctgaaccgtattgatctgtatgcccaccatagaggcatcaaaaccatttactatgcaagaacgaaagataccgggcaggacagctgtctttcttgtgtcgtttgattaaaggagagtttacagtgacaaaaatttatgacgcagcaaactggtcaaagcatgaagatgatttcacccaaatgttttacaaccaaaacgtaaagcagttttggcttccggaagagatcgcattaaacggcgatctcctcacttggaagtatttgggtaaaaatgagcaggatacgtacatgaaggtgctcgccggcctgacactgcttgatacagagcaggggaacacgggcatgccgattgtggccgagcacgtcgaaggccatcagcgaaaagcggttcttaatttcatggcgatgatggaaaacgcggtgcacgcaaaatcatattcaaatatttttatgacgcttgctccgactgaaacgatcaacgaagtatttgaatgggtaaagcagaataaatatttgcagaaaaaagcgcaaatgattgtcgggctttacaaagccattcaaaaagatgatgaaatttcactgttcaaagcgatggttgcttccgtctatctggaaagcttccttttctacagcggtttctattatccgttatatttctatggacaaggaaaactgatgcaaagcggtgagatcattaacctgatccttcgtgacgaagcgattcacggcgtgtatgtcggtctccttgctcaggaaatttataataaacagacagaagagaaaaaagcagagcttcgtgaatttgcgattgaccttctgaatcagttatatgaaaatgagcttgaatatacagaggacttgtacgatcaagtcggactctcacacgatgtaaagaaattcatccgctataacgccaataaagctttgatgaacttagggttcgatccttactttgaagaagaggatattaatccgatcgtattaaacggattaaacaccaaaacaaaatcacatgatttcttctccatgaaagggaacggctacaaaaaggcgacggtagaaccgattaaggacgaagatttttattttggccaagatgaagagcagatataatatctgctcttttggcttgaatggagaggtaagacaggaggaacggtcatgaataaaatggatgaaatcatcttggctgcaccgcggagtgacgtctttcaaaacgaaatgctgacatttcagggagtcaacagcgaagatgaacgtatcgtaaacattatggctcaaattgaggcgcatttttttgaaatcagaagaggcgacgcggaagaggacccgcgatttaaacagccgattccgtatgtcgtcatccgccgcgatgatgaggtgtttgtgtatgaacggctcgcgggcggaggggaatcgcgcctccataataagctttctctcggcttcggcggacacatgaaccctatggaaggggcggcttcattttcggaagtgctgaaacagaataccgaccgggagctggcggaagaactgtacattcgcgaggaggacaaacaaaacattgtcacactcggcctgatcaatgatgatgaaaacgatgtagggaaggtgcatatcggcatcctttctgcgctccagttagcgtctgcggcacaagtcgaagtgaaagaaaaagatcaaatcgccggccgctggatgaaactgagcgaactgaaagaggaaaatgtgtatcagcgtcttgaagcttggtctcagtttgtcgccgatatacttcaataacaaaaaacccccgttcgtccaaaaaaagggagagcggggttttttcatttagtcttgcacaatgaaggcatcaaatccggctttttcggcccgcgctgccaacgcttcagcgtaatctctggaagagaatgcgccgatctgcactttaaataagccgccttttggaagcacaatcgcgtcaaaacctttagactccgcatcggaggcaagcgcatcagcatttgctttcactttgaatgcaccgatttgcactttatataagtcagctttttttttagaccgaaagcttgctccaagcccttggcatgtcctcttgcaaggctttcaataaaactggctgttttcagtttgtttgcatcagctgacgtatcaacaaaaccattctccgtcaaaatcgccggcatacttgtctcccgcagcacatggaagttggctgttttttttcctcggtcattaaaacctgatgcttgaatcacttgcgtgtggacggctgattggtaagtcgaggtcggcgctccgacaccggggtaaatatagctttcgaatccggttccgcctcctgagttaatatgaatggataaaaaataatctgcgccccagctgttggcggcatccgttctttccgtcaggctgaccgtcttatcgcttgtcctgctcatcgtgacagaaactccttcatactcattcgtcagaatcgtgcgcaaagccagcgcgatctccagcgtgaccgctttttcctgaagtccgtttccggttgcacctgaatcagttccgccatgaccggggtctataaaaattttaaccattctccatcacctcattacagcatatgatgatattcaaatagtgcttgtacggctgtcattcataaaaaaaatgagaaatatacccaacatttcccggaaaataaaaataaatggtttgtcctcccgtttctgctgaatacaataagaaatgaaaaatatttctcgggaaagcgcaggattcaacatcattcccgaagagaacggaaaaagtgacagataaagaggaaaacgggtctcatgatgataggcggatgtcacggaaccgcttcatcatgagtaagataaagagagaacagagaggtgagcatgttggagcgcgctgtaacctataaaaataacggacaaattaacatcattcttaatggccaaaagcaagtgctgacaaatgcggaagctgaggcggaatatcaggccgccctgcaaaaaaatgaagccaagcacagcattctgaaagaaattgaaaaagaaatgaacacattagtgggtatggaagaaatgaaacgcaacattaaagaaatttacgcgtggatattcgtcaaccaaaaacgggccgaacaagggcttaaagtcggaaaacaagctcttcatatgatgttcaaaggaaaccccggcaccgggaaaaccaccgtcgcgagactgatcggcaagcttttcttcgaaatgaacgtgctttccaaaggacatctgatcgaagcggaacgtgctgatctggtcggtgaatacatcggacacacagcgcaaaaaacgagagatctgattaaaaaatcgctcgggggcattttattcattgatgaagcatactcacttgcaaggggcggagaaaaggatttcggtaaagaggcgattgatacgcttgtcaagcatatggaagacaaacagcatgaatttattctgatcctggcagggtactcgagagaaatgacacatttcctgtcattaaatcccggcctgcaatcgcgtttccctatcagcatcgattttccggattactctgtcactcagctgatggacatcgcaaagcgcatgatagcagagcgggagtatcaattaagccaggaagccgagtggaagttaaaagattacttaatgacagtgaaaagcacgacaagccccattaaattcagcaacgggcgctttgtcagaaacgtgattgaaaaatcaatccgcgctcaggccatgagacttttaatgggagaccaatacttaaaaaacgatttaatgacgatcaagagccaggatttacttataaaagatgaggcggcagctcacgaatagacctctcagccggtctgaggggtctcttttttatttctctctttaaaacccgccggatgtgtggtatacggcctgcgggtttggtatgatagtactactgcccaatacgacacagaaaggaacatccatttgaacgaacaggaaggaaaaaaagaaacggtcattttggtcggctgccagcttccgcacatgacagatgagcactttgaacattccatggaagagcttgcttcattgacaaaaacggctgacggaacggtgctgacccggattacgcaaaaacggaacagagcggatgccgctacatatataggcaaggggaaagtagacgagctgaaggcgctgtgtgaagagcttgaagcggatctggtcatttttaatgatgaactgtcaccgagccagcttaaatcactcgccactgcaattgaagcgaagatcatcgaccgcacgcagcttattttggatattttcgcaaaaagggcgaagacgagagaaggaaagcttcagatcgaattggcccagcttcaatacgcgctgccccgtctgagcggacaaggaatcaatctctcaagacaaggcggcggaatcgggacgagagggcccggtgagacaaagcttgaaacagaccggcgccacattagaaaccgcatacacgaaattaacgtgcagctgtcaacggttatccgccacagaagccgttatcgggagagacgtaaaaagaacggcgtgcttcaggctgcgctcgtcgggtataccaatgccggaaaatcaacatggttcaatcaattaacgagctcagacagctatgaagaagatctgctgtttgcaacacttgatccgatgacgagaaagatggcgctcccaagcggctacagtgtccttttgtctgatacggtcggcttcattcaggatctgccgacgacgctgattgccgctttccgctcaacgcttgaggaagtgaaggaagcagacttgatcattcatgtcattgattcatccaatgaagattatgccgggcatgaacagacggtcctcggtctgttaaaagagcttgaggcagatgatattccggtgctgaccgcttataacaaacgtgatgagacacttcctgacttcatcccgacagcgggagaaggccacatcatgatcagcgccagaatcgccggggatgaagcaaaactaaaagcggaaatcgaagcttatttgcgccgggagctgatgacgccgtatgaagttcatgtgcctgccgccgaaggcaaattgatgtcacgcatcaaatcagagaccatgatcgacagcctttattttaatgaagaaaatgaacgctacgaagtctcaggttatgtacaggaagaacaaagcatactcggagaactgaagaaattcatgtaaggaaggtatacacaacatgtttgacacactgacccacggcgctcttttacaaaaaaccgccgaagaaacagaagcggaaatctccgccgttcataaaagaatagaagaaatcagtgaacggaatgaatggagagtcctgcaaagctacagaaaacataaagtaagcgatacgcattttacgccttcaaccggatacggttatgatgatatcggacgagatacactggagaagatctatgctgatgtgttcggaggagaggcgggactcgtgcggccgcaaatcatttccggaacgcatgcgatttcaatcgcgctcttcggtgtgctgagacccggggacgaattgctttatatcacaggcaagccttacgatacactcgaggaaatcgtcggagtaagaggcggggagtattcaggctcgcttaaggaatttcaaatcggatacaatgcagtcgatttaacatcagaaggcagagtggactttgaagcggtccgggctgcaatccagccgaatacaaaagtgatcggcatccagcgttcaaaaggatatgcgaatcgtccgtctttcagaataaatgaaattgaagagatgattcgtttcgtaaaggaaatcaaagaagatgtcattgtttttgtggacaattgctacggagaatttgcagaagagcgggaaccctgccatgtcggagcggatcttatggccggttccctgattaaaaacccgggcggcggccttgctaaaacgggcggctatcttgtagggaaagccaagtggattgaggcctgctcttaccggatgacctccccgggaatcggaagtgaagccggcgcttcgctttattcactgcaggaaatgtatcaaggtttctttctcgctccgcatgtagtggcgcaaagcttgaagggagcggtatttaccgcccgttttcttgaaaagctcggctttacgtcaaaccctgcatggaatgcgccgagaacggatctgattcaatcagttgagtttcaggaccctgataagatgatcgctttttgccaggcgatacaatatgcttcaccgattaatgcgcatgtgacgccttatccgagctatatgccgggatatgaagacgatgtcattatggcagcgggcactttcgtacagggggcaagcattgaattatcagcagatggacctatcagaccgccttatgtcgcgtatgtccaaggaggattaacctacgcgcacgtgaaaaatgcgatttgcagcgccgtaaatgctttaatggaaaaagagctgatttaggccgtttgcaattttcaaagaatttgatgttaagattccttacattgtgttgacacaaaatataacatcacctataatgagactaagataagaaaaggaggaaattgagatgagtgataacattcgccgctcaatgcctttatttccaattgggattgtcatgcagttaacagaactttctgcccggcaaattcgatattatgaggaaaatggattgatatttccagcgagaagcgaaggaaatagacgattattttcattccatgatgtagataaactgttagaaatcaaaaatctgattgaacaaggcgtcaatatggcggggatcaaacaaattctggataaggcatctgccgaaccggaagaaaaatccgaaaaaaccgccaaaccgatgaagcacaatctgtctgatgacgaactcagaaagcttctgaaaaacgaactgatgcaggcaggccgtttccagcggggaaatactttccgccaaggtgacatgtcccgattctttcattaatccgttagcaactgttttgctatatacatttaccttttagaggaggagttttacgaaatggcaaagtacacaagagaagacatcgtaaaattagtaaatgaggaaaacgtaaagtatatccgccttcaattcacagacattctcggaacgattaaaaacgtggaaattcctgtgagccagcttgaaaaagcacttgataataaatgcatgttcgacggttcttccatcgaaggtttcgtccgtatcgaagagtctgatatgtacttatatcctgatctgaacacatttgtaatcttcccatggacggctgaaaaaggtaaagtagcacgcttcatctgtgacatttacaatccggacggcacgccgttcgaaggtgacccgcgtaacaacctcaaacggattctgaaagaaatgaaagaactcggtttcagcgatttcaatcttggacctgagcctgaattcttcctgtttaaattagatgaaaaaggcgaaccgacgcttgaattgaacgataaaggcggatacttcgacctggctccgactgacttgggagaaaactgccgccgcgatatcgtgcttgagcttgaagaaatgggctttgaaatcgaagcatctcaccatgaagttgctccgggccagcacgaaatcgattttaaatatgccggtgccatccgttcttgtgacgacatccaaactttcaaattggttgtcaaaacgatcgcccgcaaacacggtctgcatgcgacattcatgccaaaaccgttgttcggcgtaaacggttccggtatgcactgcaatctatcactctttaaagatagcgttaacgcattctttgataaagacgctgatcttcagctgagtgaaacagcaaaacatttcattgccggtatcgtaaaacacgcgacaagttttacggctgtcacaaacccgacagtgaactcttacaaacgccttgttccgggctatgaagcaccttgctacgtggcatggagcgcgcaaaacagaagcccgctgatccgtatcccggcttcccgcggcatcagcacgcgtgttgaagtccgcagcgtagacccggcggcaaacccgtacctggcgttaagcgtattgcttgcagcaggccttgacggaatcaaaaacaaacttgaagcaccggctccgattgaccgcaacatctacgtcatgagcaaagaagagcgcatggaaaacggcatcgtagatcttccggcgacactggcggaagctctcgatgaattcaaatcaaacgaagtcatggttgcggcgctcggcgagcacctgttcgaacacttcatcgaagcaaaagaaatcgaatgggatatgttccgcacacaggttcatccgtgggagcgcgaacaatatatgtctcagtattaatctctcaatcccttggcactattggtgtcaggggattttttgatttgttaacaaatttaataatttaatatagatcatacaccacccacaaaacacccacaaaaaatcaataaaaattactccataattgtggagatataatcctcattcatatgctacacgtaaaaaaaggtatgtcatcgctattgataaactccatattgtattctcgttttttatttgttttgatgatccattcgtttttcttttccagctacagccaattgaacctcttttttgtggaaaaaccacgcttagacttttctttaaatttttgaaggaatcggttgatgctggtatcagcctgtttccttcaatcagagattctttcatattaaatgaactgaaggttaagcagatggaaaggccaaaattccccctgcctgacggtgttttcaaagtcaccaacccattaaccagaggcacagccgtaaaacaaatacagacagcgttggcggctctttatttctacccggataaggggacaaagaataacggtgttgatggcgtgtatggtcccaaaacagcaaatgcagtcaagcggttccagtcagtaaatggtctgactgttgacggcatttatgggcctaagacaaaagcgaaaattgaagagaaattgaaggataacaggagttagtagtatcctttattatcatattgtgtcaaatttatgaagtttaattcgaatgggaggatttgttaaatgaaggcgggtattattacagtgacttaattttaaaagggggaaatgtgaaatgaaaaagtcgttagtatcaatgttttttgttctgattttgatgtttactgctatgggaagtgcatcggcctatgaatttaaaggtgtactgcctcttaatgacaaggtaagtggatcttttgctgatgccgctgctgctaaagaaggacatgagtggcaattccatccgggagcagctacaaaagtaaagttttatttgtctaaagatagtacaacaactccgttaaaagttagtatttacaaagaagatataaatactggaaaagtaactcttgtaaattcttatgattcctcagaattatcgaagtatactattgcagtcagtaaaagctatacttatagcatgagggttgccggatatagcactgcaaaaactggcggatcatacacattagaaagttctgtaattcagtgaaaaaaagggagcgatggctcccttttaaagttactataagttttttgagtctttattaattccatctccagttaattgctccgtcagggtaaacagcaggaacaatgattcctcgtttgctgctgttctcgtcaatgatgtaccaattttcatcttctaaccattctttatcgtagcgagtttcatcaagttgtccttcttcatctataagatcattaaatagatccctgaaaacttcaatttctttttcaggttttagaattccatacatccacattccctcaccggaaacatcatgaatttctcctaatttcgtacctttaaaatataaaatcatctattttgactccttttgatgcaatttaaaatactcttttggtatttcgcctcttattgcttatcattcttaattagacgttcaatttgtttcggaaataaaatagctactccttttacttctcctgattgaatggcctttcgcaaagccggcagattcaattcaatagaattatcaccgtaattagttattacatttttattcattgtgaaattggtgtacggactattggacttttgagcttctctatatcctcctaaaatatgttctgttactgtgacttgtctgcctttatatataccttctttatttattggcacaagatttccggtttccggatcaatatgtgattttcctaagccgttagctgctttggtagaatataaatctttatcccatgatagaggtttgaagatttgccggctcctgtgcttgctttcaatacttttcccgttccaattgctcctacaggtccaagagcagctagagcgctattaaaactgttctcacgtctctcctcagaaatcttatttccaaacatatcccggccagttatagcctcactaaaaccatttgcagatgcaagtccataaagtcctttgctggagttttgaagggcagggaatgtcttaggtgttttatagatatcaagcgctttgtctgccctataaatggctttgctcgttgagtagaaagcctttccgcctttggctaattttccggcccacccgacaatcggaatataccctgcagcagccattcccccggctgcgacccgttgcccggcagtaagtttttcacctgtaacggggtcaactccatcagccgcccttttataatcataatatccggtaacttcacctgtaaaatcacaaacaacatcccatgttttttcgtaccaaggcctgttcgcaagctcttcctgttcctttacaattcttctttcatcagcctgttgctttttgaacgaaagatattcggacgactgtttatgtaatcctgcttgcatctggtggatttcactttcccggtacgccttgggcattatagttgagcggggtggcgtttttgcctttccctgtcgcatcttgtaatgcctgaaaatctgccataatgaacgcctcattagcttctaacagcccatatttatttgaaagattgttatccagctcaccaatttttgggttgtatcagaattatctaatttttgatccgcgttatcggttgaaaagagatcgagcggcagtatatctgcgatttcatcaaggatacctttcatttcgttgcgctgctcttgcataatcgcttttgatttatcaagtgcgtttgtcaattcatgttcaaggaaagattcttccacataagagtctgaaaggtcggcatcttcaatcatagcttctatgtttgtgagaaacgcaattttcatatcaatcaattccagccattcatctgtgacgccagcgtgatcttgaaataaagctttgatgttatcggcgcctttgcccgaaaaatcgctgtcgcccaggtctgccatgccttggaacgcatttttcaggttcgtcatttggctgcgcaattctttgtattcgtttgcgcgttgtttggcggcagaaagcagggtggttgcttcaatgattttcatgatcatatcctttcgtgataaaatgttattcaaaattttaccacgatgaaacccggagtaaatacataacaaaacttccaaatacaaaatagttcttttggtttggtttatttttacttttagccttcgattcgaactttaaaaaataggttgaattgccctttcatctgattggaattgcggcatgtcgaaaattatttctatatattacatattatgctaaacatatgctagaatgttgtttgagaaaatttagaatatttgcagaaagaggggtttatcgtatgagtaaactggcttctgaaagagttgcaaatatattaaatgattggtatatcgcgataaaacaacaagacgctgagtctgctgagaaatattttgaagagatcaaaccacttttagatgaaatggaagaggatcaagaggttttaatgtattattctctgctggaagaaaggcataaaatgcttttgtatcaggttaaaggggaggaactgccgcctcattcatactttaatgagaaccacgctgatgaaatcctaaaaacagaccatatgattgaatattatttttatttatttgaagcgcttttcgagtcatataatagaaatttcgagagcgccataagtttatttaatatcgctgaaaaaaaactttcattaataccggatgaaattgaagctgcagaattttattcaaaggttgcctctatgtacatgatgttgggccagaacatcgtatcgttaaattatataaccaatgcgatgaatatctttaagaataatgaaaattacttgaagcaatttgcgacgtctttaatggtggttgctcataattacactgaattgggacaatacgaaaaatcggaggaacattatttacaagcaattaaagtggcaaagaaattggatgattcatttttcgtggctatgattcatcacaatttaagcattacatattcagaagcgaagcggccgcaagattgtcttaatgccattaagcatgcattaagaaataaagagtggtgtggatcatcgtattatataaattcattatatatgatcgcaaaagagctggtgatgatgggggaaaacaataaagcatcatattatttgaaaaagggacaggaaaatcttagacagaaacagaataaaatatacgaagctaaaataaatattattcatgagctttcacaaagtcctttaaatgagcgtgttgatcggattcacagtcatatgaacagattagcagaacaaaatgactttgacagcattcgcgatctagctctaatcacttcaaaaaaatttgaagaaaggggactttataaagaggctctaaagttttctaataaagctattttagctgaaaagaaaatgaagcagttggagggaatttgatgaaaaagagaattctttttgcggcattatctgttgcttgtttgagcgggttagctgttgcgggctttatggggttttctaataaacatgtagctgaaaagccagtcggtacttatatattagctgaaaagccagtcggcacataataaaaaacaagtctcaattaaaagatgggggtcataatatgacaaaaggcgttaaaataacattatggagcatcttagggatagtcatcgtgttaatgataattggagttgtctctttttatcagaccccatcttcataaagcgaaaacatgtaattaatctctttatacgtatacctttagattacaataaaaatctaaaaagaaatagatgtggggcgcccacaaagacacccacaaaacacccacaaatataatattcttgatgatttcctattcgaagagaaataacaaaacctttttaattcaacgtttatcatgcattttgacattgaaatattgcctaggttataatccgcacacaggttcatccgtgggagcgcgaacaatatatgtctcagtattaatctctcaatcccttggcactattggtgtcaggggattttttggttttggtcataagattaaaagaacaacatttttggtccttgaccaaaatatgaccaaaaaaattgaagttatgaatctaactacataattgaggacacgtatttattgtaatcccttattcggtttaggatgaaggctaaatgaagccaattatgttctaaaattgaaccggccatttttatttttaaaaagcaggagcaggaaattcatcaattttgatacgaagtaaactataaggtttctgtcgtaagtcctttccataatgaaatctagcctgccgatgtaattggttcacgatgacatataagtattcatccggaccaatcgaaaaagtatccggccataaaattctcggatcatgtgcgatggtttccattgtgccattcggcagcatctttcgaatactattgttctcataatctccggcataaatggctccttttgcatctgtaatcattccatcagacgcgcctttttctccccaatacgccacatgataaagtaaatccatgtccggtatatttctatctctcagggcttctgttgagatcgagaacagatgacggctggtcagtggacaaaaaaataatacctttccgtcaggagaaatcgcaataccgtcggatgccagcctaaatggggaagttgaaccatccctgttacgatccatcaaaattttgccttctactttcggtataaaataggaatccggtgaagttggatttgctccatttaaccgtctaaatgcgtttccggtttctaaatccacgacgataatagctcctggtcctttggcagaagaatccgttatataggcataacctgcagttccaacacgaaaatcaaatcggacatcattcaggtaagttgttggaaggacaacatcttctgtaaaggtataaactcttctgattgtattggtttttaaatcaacagcgactaattttgccccgcctttaattggttcagaaaaattgggtgccgccgtatctagtacccaaagcgttcctcttccatcagtaactacactttggacactgatgaaagtcattttgatattctcagggttaaccaaattggtttgtaaatcaggataaggctgcaatttatccccaactatctccgccaccgtaaatttaacatcgtctccccatttcggaaaacaaatgaaaatacgaccagtttctgaaacagtaacaccggtaggcatagctccataaaatgcataaaccagttctaaatccccaaaatatttttcaaaaggcagcataggtttcataatatcctcctcaaccaattaaacgggatatcacttatatatgattcgcattttttctagtgcatgtttcttattaagtttttctaaacaaaagatgatggaagtgcttatcatttaataaatcagtcaggtgacacaggggggtttacttaacgtctgtcgaagcagtcggcaattacaacatggtatgtcctttggtcggttttaaattctctgaaaaaagagttgaaaaagcagaaaagattttataatatgaaatcaagttagtttgttcgggcaacaaactaataaaaccactttaattgtccatcatgtaaaggtcttaaatgggagggggataagaggctcgatttaattggaggtatataaaaagcgaaagccaagcttttatcctgttcactgctatctgatcaccatttggatgttgaaaatgctctgtgaaagtaaaccgctatcatttttttgaaagcgcttttatataccgctcactggccgataattttaaaaaaatgttataccatttcatcatgttccttatgtaaaggatcgaaaaggggagaaatcatgctcagtgaaaatgtaaagaagatcagcatggttgaaaaagttggatatgcgtctggagattttgcatgtaatttaatttatgcaacagtgtctacgtatcttttgttcttctatacagatgtttttggtttatcggcagcagcagccggtacgatgtttttagtggttagaatcatcgacgctctcgctgatccttttattggaacaatagttgacagaacaaatagcaggtttggccgcttcagaccgtatcttttattcggagcttttccctttgtcatattggcaatactctgttttacaaccccggatttttcggataaggggaaattaatatatgcctatatcacctatgtcggcttatcgcttacatacaccatgataaacgtgccatatggcgcgttaacatctgcaatgaccagaaataatcaagaagttgttagtataacgtctgtccgtatgttatttgcaaatcttggaggacttgtcgttgcattttttgttcccttactggctgcttatttaagcgataattccggcagcgaatctcttggctggcagctaaccatgggtattatgggagttataggcgggtgccttttaatcttttgttttaaaagcacaaaagagcgtgtcacgcttcaaaaatccgaagaaaaaattaaatttccggatatatttgagcaatttcgtgttaatcggcctctagttgtattaagtattttctttattattatttttggagtgaattcaatcagtaattcggttggcatctattacgtaacgtataatttagaaagagcggatttagtgaagtggtacggtttgttgggaagtttgcctgctttggtcattttaccgtttattccaaagcttcatcaactattagggaagaagaaattactaaactatgcattattactgaatatgatcggcctcttagctttacttttcgttccgtcaagtaatgtattcctgatactttcctttcgattgctggctgctgcaggaagtctcactgccgggggatatatgtgggcgcttattcctgaaacaatagaatatggagagtataagaccgggaaaagaatgggcggtcttatatacgctattatcggatttttctttaaattcggcatggccttgggaggggttgtaccgggtttggttctagatcagtttggatatgtggcaaatcaggtgcaaacgccggaggcattgacgggaattttaattacaacaaccattattcccgtggtcttactggttctggccatgattgatattaatttctataacttagatgagaaaaaatataaaagcatggttcgagaattagagaatagagacaaagtttatttggatcatattgacgatttcaaagcttaaaacatgatgagtcaacagaaaatagctgaggaggagttcaaaatgaagattatcaatccagtacttaaaggattcaaccccgatccgagtatttgcagggttggagaggattattatatcgctgtatctacatttgagtggtttccgggagtccagatacaccactcaaaagatttagtcaattggcacttagttgcacatccattacagagagtttcgcaattagacatgaaaggaaatcctaattcaggcggggtctgggcgccatgtttaagttacagcgacggaaagttttggctgatctatacggatgttaaggttgtagatggcgcctggaaagattgccacaattatttagtgacttgtgacacgattaatggtgattggggggagccgatcacattaaacagctcgggttttgatgcttctttgttccatgatacggatgggaaaaaatatttattaaatatgttatgggatcagcgtattgatcggcactcctttggaggcattgtcatgcaggaatattctgataaggagcaaaaactaatcggtaaaccgaaagtgatttttaaaggaactgaaagaaagctgacagaagcgccgcacctttaccgtatcgggaactattattatttattaaccgcagaaggaggaacacggttcgaacatgctgctacaattgcccgttctgcaaatattgagggtccatatgaagttcatcccgataatcctatcttaacgtcatggcatgcgccggaaaatccgctgcaaaaatgcggacatgcatccattgtacaaacacatacaggtgagtggtatttagctcatttaacgggacgtcccattcatccggacgatgattcaatttttcagcagagaggatattgtcctctgggcagagaaacagctattcaaaagctctattggaaagatggctggccttatgtagcaggcggaaaagaagggagcttggaggtggatgcgccttctatacctgaaacaatgtttgaagacacgtatccggaagttgatgaatttgaggatgcaacattaaatattaattttcaaacgttaagaattccgtttacggagaaattaggttcattaactcaagcgccaaatcatttacgattatatggccatgaatccttaacttcgacatttactcaggcatttgtagccagacgctggcaaagcctccattttgaagcggaaacggctgttgcgttttatccggaaaattttcagcaagctgctggtttggtgaactattacaatacagagaactggacggctcttcaagtcacgtatgatgaagaacttggccgtattcttgaattaacgatatgtgataacttttctttttcacaaccgttaaaaaataaaattgtgattcctcgtgaagtcaagtatgtctatttaaaagtgaatattgaaaacgaaaaatattattatttgtattcatttaacaaagaagattggcacaaaatcgacattgcattagaatcgaaaaaattatcagatgattacatccgcggcgggggattctttacaggagcttttgtagggatgcaatgccaagatacgagcggtcatcatatttcggccgacttcagatattttcgttataaagaaaaataatgtgcacatgaaaaaggagatttctattttagaactcctttttcatattagaaggtgcctatgtcagtattgattaagaaatactcctagaataaaaaaacccatctttaaagatgagcgtaaaacatagaagtatgtacattcagttatgaaccatgtcgagaaaatgatcaataacaatagaggacattcctagagcaggggcattttttcctaagatagatggtaataattcatagctattgtctagttgggaataaaccctggatgacacttcgcttttaattgaatgtaaaaccataggatgcgattcaatgatgctgtttcttaaaatgatggcttgcggattaaatgtatttaaaatattggtcaggcctattcctaaatagaaaccaaaattctgtaatgcctgtaaagttccaacatcattcagatgggcaaggtctatgatatcttggctggacacttttttctctttcgtctgaagagatgttaataaagccttctctgaagcatacaattcccagcagcctcggtttccgcagctgcatttaggacccttaaagtctattgtcatatgtcccatttctccagagaatccgccaacccctctatataaatgattgttgatcataacgccgatccctattcctgtaccgatacttgcataaataatgttatcgtgattttttgcagcaccaaatactttttctccatatgcgccggcatttgcctcattttcaataaaaacgggcacattgaacttcttttggatgaaagattttaagtcaatatctctccagttggcgttcggagcgaaaacaattttttgatttttgtcaatcagcccgggcgcgcatatccctataccaataagaccgtatggagattgcggcatttttgcaataaagtgatgaatcatctcaattaaaatatctttagtgatttctggagaattgcattccaaatggtggtgttgatcaaggacgatcgtcccttcaagatctgttaaaatgccattaacataatccacgccaacatctattcctacggagtatcctgcttttttattaaaaacaagcataacaggtcttctgccgccgcttgattgtccctgaccgatttcaaatacgaggttttctttcattaatgtgtttacctgtgacgaaacagttgatttatttaatccggtcatttcagataattttgctcttgaaataggtgaatttttaagtatttcgtttagtaataacttttggttaacttttttgacaaaggcttgatcagcgatatccacttcatccactccatttgtataatctttaaattaagttgaacgttctgtgttatcgtgcgaaacgcagtacatagcgaatccaacctttattatatctaatgtgttcgtaaaaaactaaaaaaaatattgaaaatactgatgaggttatataagatgaaaataagttagtttgtttgggcaacaaactaatgtgcaacatgataaaagcatctgtatttgaatgatcatgtttagaatttatttttaagggggaaatcacacatggctcactctcattccggttcggtcaactattttgaaagcgcaaacaaagtgatttacgaagggaaagaatccacgaatcctttagcatttaaatactataattctcaagaagtaattggcggaaaaacgatgaaagagcatttgcgattttctattgcctattggcatacatttaccgctgacggcacagacatttttggcgcagctacgatgcagagaccgtgggatcactataaaggcatggatctggcgagagcgagggtagatgcagcgtttgagctgtttgaaaaactagatgcgccattttttgcttttcatgaccgggatatcgcaccggaaggaagtacgttaaaagagacaaatcaaaatctggatataatcgtggacatgataaaagactacatgagaaccagcggcgttaagctattatggaatactgcaaatatgtttacgaatccccgtttcgtccatggtgcggcgacttcttgtaatgcagatgtatttgcgtatgccgcagcccaagtaaaaaaaggattagaaacagcaaaagagcttggcgccgagaactatgtattttggggcggacgtgaagggtacgaaactttgttaaataccgatttaaaatttgagcttgataatatggccagatttatgcatatggcagtggattatgcgaaggaaatcgggtatacagggcagtttttgattgaaccaaaaccaaaagagccgactacccatcaatatgatacggacgcagcaacaaccattgcctttttaaagcaatatggcttagacaatcattttaaattaaatctcgaagccaatcatgccacattagccgggcatacattcgaacatgaattacgcatggcgagagtgcatggccttcttggctctgttgacgcgaatcagggtgatccgcttttaggctgggacacagatgaatttccgacagatttatattctgcgacattagcaatgtacgaaattctgcaaaatggcggtcttggaagcggaggattaaactttgacgcaaaggtcaggagatcttcttttgagcctgatgatttactatatgcccatgttgcagggatggatacatttgcaagagggttgaaagccgcccacaaattaatcgaagatcgtgtgtttgaagatgtgattcaacaccgttaccgcagctttactgaagggattgggcttgaaattgcagaaggaagagctgattttaagacacttgagcaatatgcgctgaacaatcagccaattaaaaacgaatcagggagacaggagcggttaaaagcgatattaaatcaatacattttacaggtataatgaaaaaagaagctccagatcccgctgtaaaaagatgcaggcagccaagttcccggaattgaccgtcatgaagttactgttatggcgggtcaattcaatggggatctatttagagaggaaggagtgaaaaaatgaagtatgtcattggaatagatcttggtacgagtgccgttaaaaccattttagtcaatcaaaacggcaaggtttgtgcagaaacgtccaaaagttacccgctcatccaagagaaggcgggatatagtgagcaaaatcctgaagactgggtgcagcaaacaattgaagcattggctgaattgatttcgatatccaacgttcaagccggggatattgacgggattagctattcaggacaaatgcatgggttagtactgcttgaccaagatcggcgaatgctgcgtcatgcgattctttggaatgataccagaacgacgcctcaatgtagcaggataaccgagacatttggcgatcgtctgcttgatatcacaaaaaaccgtgtccttgaagggtttacattacctaaaatgttatgggtgaaggaacatgagcctgaactttttcacaaaaccgctgtttttttgcttccgaaagactatgtgagattccgcatgactggcgccattcacactgaatactccgacgcagcgggaacgttacttttacatatgacccgcaaagagtggagcgatgagatttgcaatcaatttgatatttcagcggaaatttgtcctccgcttgttgaatcccatgactgtgtaggatcgctgcttccgagcgttgcggcgaagactgggctgttggaaaaaacaaaagtgtacgccgggggagcagataatgcttgcggtgctgtcggagccggtattctttcttccggaaaaacattatgcagtatcgggacgtcaggagtcatactttcctgtgaagaagacaaagaaagggactttaaagggaaagtgcacttttttaatcatggaaagaaggattctttttatacgatgggagtcacgctcgctgcagggtacagcttggactggtttaaaagaacgtttgcgccaaacgaatcgtttgaacaattattgcggggagtggaatctgttccgataggagcaaatggactgctgtacactccttacttagtcggtgaaagaacgccgcatgctgattcatctattcggggaagcttgatcggaatggacggagcccataaaagagagcactttttgagggcgataatggaaggcatcacattctctttatatgaatcaattgaactattccgcgaagcgggaaaatcagttgatacggttgtctctattggcgggggagctaaaaatgaaacgtggcttcaaatgcaagctgatattttcaatacgagggtggttaagttagagaatgaacaaggtcccgccatgggggctgcgatgttagctgccttcggaagcgggtggtttgactctcttgaagaatgtgcagagcagttcattcatgaagcagctgcattttatccaaaagaacaaaatgttcaaaaatataaaacactattcgagttgtataagaacatttacgttcacacaaaagatctcaatacagctttaaagagctttcgacaaaaatgaagaaagaacctcgccaaattggccaggttctttttatattgcacaaaaacagacacggtgatataatcagaacacgcgcgctttttgtgtgaaaagtcatagttatccatcttatattatgattatatcatgctgaaaagctcttgtcaaatttttttgaaggggagatatagaatgagttctttggttctcggcattcacgaaattgaaaaaacacagcctttgctcgtaggaggaaaagggttacatttaggggaattatcaaaaattcaaggaatacaagtaccggaaggattttgtgtcacaaccgcaggatatcaaaaagccattgaacaaaacgaaacgttacaagcgctgttggatcaactgaccatgctgaaagcggagaatcgcgatcaaattggtgaagtcagcaaaaaaatccggcaaaccattatcgaagcagaaattccttcagatgtagtcaaagcagttgcttgccatctctcccggttcggcgaagaacatgcctatgccgtacgttccagtgcgacagctgaggatttaccgcatgcctcttttgccggtcaacaagacacctatttaaatattaccggcgtcgatgcgatcttgcagcatatcagtaaatgttgggcgtccctatttacggatcgcgctgtcatttaccgtatgaaaaatgggtttgatcacagccaagtttatttatccgttatcatccaaaggatggtgttccctcaggcttcgggaattttatttaccgctgatccgatgaccggaaaccgaaaactgctatccatcgatgccggttttggacttggtgaagcactggtctccggcttagtctctgccgattgttataaagtacaggacgggcaaatcgtcgataagagaatagaaactaaaaaattggctatctatggacgaaaagaaggcggaacagaaacacaggagatcgctcttgatcagcaaaagattcaaacactgactgatgaacaaattttacagctggcacgtatcgggagacagatcgaagctcatttcggccagccgcaagatatcgaatggtgtttggaccgcgatactttttatattgtccaaagccgtccgatcacaacgttatatcccgttcctgaagcgaacgatcaagaaaatcacgtctatatctctgttggtcatcagcaaatgatgacggatcccataaaaccccttggattgtctttttttctgttgacgactgctgcacccatgcgtaaagccggcggaaggctattcgttgatgtcacacatcaactggcatcccctaatgtcagagaagttttcttaaaaggcatggggcagcacgacccgctcttaaaagacgcacttatgaccataatagagcgagatgatttcattaagccgatacctgataaaacggcaccgattcccggcaaaggcaatgcagatatgccggaacaagctgaaaacgatccggcaattgtttctgatttgattaagagcagtcaagcatcgatagaagagttaaaacaaaacatccagacgaaatcaggatctgatttattccgttttattttggaagatatcaaggaattaaagaagattctatttaacccaaaaagttcggtgttgattcgaactgcaatggatgcttcatcatggattaacgaaaaaatgaacgagtggttaggtgaaaaaaacgcagcagatacgctttctcaatctgtaccccataatattacttcagaaatggggcttgcgctattggacgtcgccgatgtgatccgcccttatccagaagtaattgcctatttagagaatgtaaaagatgatcactttttggatgggctggtgacgtttgaaggcgggcgggaaacccgtgacgctatctatgcttatctcaacaagtacggaatgcgatgtgccggagaaattgatatgacaagaactcgatggagcgaaaaaccaactgcacttgtccctatgattcttaataatctcaaaaactttgagccaaatgccagccagcggaaatttgagcaagggcggcaggaggctttgaagaaagaacaagagttattaagccgattgaagcaattaccggatggtgaacaaaaagccaaagaaactaaacgaatgatccgcatcatccggaacttcagcgggttcagggaatatccaaaatacggcatgatcagccgttacttcgtttataagcaggctttactgaaagaagccgaacaactcgcagaagcgggcgttattcatgaaaaagaagacatatactatctcacttttgaagaacttcaggaagtcgtacgcacacataaattggattaccaaatcatcagcacacgaaaaggcgagtataaagtatatgaaaaactatctccgccgcgtgttatcacgtctgacggtgaaatcgttacaggcgagtacaaacgagaaaatctcccggccggagcgattgcagggctgcccgtttcctcgggggtcatagaggggcgggcacgggttattttaaacatggaagatgccgatttggaagatggggatatattagttacctcctatactgatcccagctggacaccattgtttgtatccataaaaggcctggtcactgaagttggcggactgatgacccacggagcggttatcgcgcgtgaatacggcttacctgcagttgtcggagttgaaaatgcaacccaattgataaaagatgggcagcgaatccgcgttcatggaacagaaggctctattgaaatattataatagcgggggtgtgcagcacgtcaccagatatttcccgcattttactaagaaaagccggaacctcttagaggaggaatccggttttttttatgtgaaaatgactcaatgtgtgaacaccgcattttctgggtgagcccttcagtgactaaatctttttatgaaggtgagtaatatcctttttaagttcacaacatctgtaatccgatgaattaaaaacgccttagtaacaattatttaggggctatgttcatgaacaagtctttattcaaaacaaaatgacctattgggttaatggcgttaaagatgaagataagtctggtgtctttgaaaaagaaaagtctgcagaagatacaacgggcccatcatcaaacatgatgagcggttgaactggatatgtatcagattgtttaggcgataagaatattagccaatgagcaatcactggtttagctatttttatatggaactgcttgcgaattgttgattttcggaatcgtttttaaagaatggatcacaacgccttttggattgttcgcctcattctttatagcggcaatattggcgcaggcaggggtggaaactctcccgcttaccaggtaaaaataaaaaatgtttatctcagattggtttttttaaaaagtaaaaacgccataaaacttcttatggcgtctgtccgaactaagggatgcaatgtttgggagacgaatataaatcgtcaatgtgctagaaaaggaatgcagcacctacaatgattaacaaaatgaacagcacaacaatcaatacgaaagagtttccgccataatttccaccgtagttccccatattattgccacctcctgttgttaggatagtacataatatgccggacgataaaattcgacatagatttaagtctaaataagaaaaaatggatgttatgtctaaaatgaagagctactaaaacaataaaataatgggaggttaactgaaagagagaaatggatgggacggtttgctgtttaaagaggagggatatggctaaacatgcaataaaactgtgtatgaaagtggtgagccatgaagttacttcatcatgcagaaccacatacgaagaggtacagggaaattatagttaacgaaaatattcatcatttcccgggcaagcgcagtatacgacaaatcaaaacaaatcacaaagggacggaaggtaagataaaaggaggctgcttgcgggtttgtggtgcagataaagtttccgtttcataaaggtcatatgtttattcgaaactttacgtttattcctgcagaatgcttgtaaaagaaagtcggcaaaactgccgactttcctaacggaatttagatctcaacagatctaaagaaaccatcgacactatcaccggtgccgctatcatatttcaggatgtattctcctttttggttaacgctgaattcttgaatgaacgttttccccgcatttaatgtcgtagaggatataaggaagaagctccctgattgagtgaggtataacgatgaccggggcggctgcggatcaactgaaacgaagtatattcccaggcaaggagtatttctttaacctgaaacttttataaagcattaacgtattactttataaaggtaaataaggaggcttatgaatgggattaaaaaatttctttaatactgagttaaaatgctctatctgcggaaaaacattaaaatcaggggatgagataacagcttaccttacacttccgagtgtgaagaagatgcctgtggggagaatggataaagtgttaagcaaacactctgataaggtctgctgtaaaaagtgcagtgagtaggtttttagtgttatgaggaacctctggcgggtttcctcataacaaatatcaaccaattaaattagaaaaaagcgaaattgtgatgattaaagtagataaagaactgagggataccaaagggatcatttttcgtttactttgcttttttgaaggtttgtttagctcgtggatcactgcaccccataaaagcatggatgctaaaatgataagactcatatgtaacaacactcctttgtttctataaattttaccatatatatcacaaggatgtcgattgaacgaacatctctataaaaagaagatgtttatctaaaattgttgagagattcagtgaactattatgtagattaaattagagaagttcgaaaaaggcctcaaattactcagtgaagatgaatatgaagaggttcacagttcatatcctacagttgctcaaacgttcagtcacatctgcgcggtggatgttatgtggctgcaagtgcttaaagggatagacatgcaggaagcattggaaggttctatggcttatgcggaaaggactcatttgtattctgcagatgaatttgcggcgtcttatgaagaactggcttcacagtttgaagaatggatgaatagccaaacagatgtagaacaaacaatgaacttacataatccttggttaggttacagagaaactgcttactcagaaattttattccatgttgccaatcacggaacttatcatcggggcagcataacaactatgttaagacagcagggctacgcttcggcaatgaatgacctggcattatattggtatcagggttagttcaggcagtacttgcaaaatgaataaccgccgaatggtctgtaaagtttcttttctgaactaaatgacaaagtctcattcagtctgggtggggcgctgagcaagaatagagatcaaaggctgccgtatcattcccggcagccttaatgattaggaagtaaaatcgataaccatgcggccggtcactttaccttgctccatttcttcaaaaatatcattcacatcttcgatcgggcgttttgtcactttaggtacaactttaccgtctgcagcaaattgaaaagcttccttcaggtcttctctggtacctactaatgaacctactacctgaatgccatctaacacgagacggggaatatctaaatccattttgtccaccggtaaaccgacagcgactacgcgggctcctgcttttacaacatcaatcgcttgattgaaaggggttttagagacagctgtgatgaccacagcatcaagccctaaatcgttagtcacttcttttgccttagcgacggggtcttcgtttaaactgtttacaaccgcatcagcgcctaagctcttagcaaaattcaatttttcgtcgctaatgtcgaacgcaatcactttagcgttaaagacattttttgcatattgaacagccaagttgcctaaaccgccgactccaaatacaccgatccattgacctggcttaatttcactgactttaacggctttataagttgttacacctgcacaagtaatgctgcttgctgctgcagggtctaaattttccggcacctttattgcataatcaaccgctacgattgcttcttcagccattgcgccgtcaactgtatagccggcattttttacatcgcggcacaaggtttcacggccagttaagcaatattcacagcagccgcagctttcaaacatccaggcaatagagacgcggtcgccctttttcagacttgttacaccttcaccaatctcagttacaatgcctattccctcatgacctaaagtgacgccagtaacatccccgaaatcagcatttttaacatgtaagtcagtatgacatacaccacagtattccatcttaactttggcttcaccatgtcgcaaaggacgtaattctttttgtacgatcgctatacttttgtcttttgttgctactactgctttcaaatcatacacccctttcgaatattagcagaaaatttttacttatcttacaatttagcacactgctcttattttgaaaacccttacattttttgcggacaagtgtctctacaaaagttgagggagccatgcagggaggaatctatggatatcatgtgtcatctccaaatgcacagaatttacatatatacataaatggatgcgttttcaaaagaggctttttttgagcgataaaaagctgacggaagataaatttgacaatcaccggctcactaagtttttgccctttatcagccctaaccctattacatcatgtaatccggttcaaagataccttaaaatcgataaaacctcgttcataagtccgttttccagcgtgaaaggagacgtgagtttaagtagcgccaaatgctgctattcgtgcgattagttcaaatacaaatcttcaagagggagtcattttacatgatttgttaacaatttgtttcagtcaaagataaggcatattccatttatatcggaaacaatgtaagtgtcggacatgatactctcatttatggcccttgttatcttggaaatcacacgttcatcggttttaaggcaatcgtgtacaatgcaattataggaaaaggatcatttgtttcatacaatgctgttatcacaaatggtgtacggattgcaccgaatcggttcgttcctcccggtgccgacatagatacacaagaaaaagctgacagactcagaagagtgacagaagaggaacgtgaatttgcacgggaagtgcagcgcgtaaatcaagaatttcccgcttcttataaagcgttattcagctaacgaaaagcaaaatgcgaatatcctaaattaaattaatgcatgagaattggcgctccacgatgcaaggccagataagttttgggaagagtcagatttcgctcagggatccacaaagggaagagatgaaagctgttcatcggatatttgtggggaagctgcaagaagggtcgaaggtgagcagagcggcggattaaaactgaccttcccgcaaatttatcccaataggactgacaggaggatacaatcataaaaataaaatgatgcttcgcgaatgagcctaaaagcggctcttttatgatgcttctttgacgctttaatgggaaacgcagcactcatggttctgctggataagacagcttttcttatacaattagacatcttacaagttacttatttttacataactgttggaaatggtctttccatctgagataataaaattcatcttgattgatacatgggggagtaaggatgggctgtttttatcaagcggcacgcaaaccattttacaaacaaattcctcaagcggtttttataaccgaagaaattagtgctttggataaacgctgtaagaaggactctctgtttaaataaacgaggtgaaaatcaatgaatggtatagaattcttagaatctgtgtcgcgactcggacaactcattttggtgttttccagctacgccgtttattggaaattagggaaaacaaaaagggaacgaagacttacaaaattcgaagctttgcttaggttctttgtaatgtttggtctatgtgcatgggggctgtcgtttcttgctttgaatttgtggtcgtaatcgttctgccgatatttgacttaatgggctgttacaccactttacactttcgggaaactcactagacatcatcttctgatactgtctttagtgattcaataaacgatgtaatattgtatttaaaatattatgtgcgaacattcatcatgagaatcggacgtattccgagcgtatttatggggaaattgactgttttatgatgatgtgttaatattatgcagtaaaaatattgaactattatgtgagtattagattacggaggtacatatgaatagaaaaagtagtatgttaatgaaaatagtttcctcagtttctatcttgggcggtgtaggttttgtaactgagtcaggttcacaaacttcttttatgaataacgtagcttctgctgcggaagcaggcattcttcctagtgaaaatgcttcattattatctgagtcgggagatataagtcattatcattttgttaattctagttctgtttttaattatgctgataacaaatgggtttataaatcatctacaacaccaattaaagatgttaaatcatttgatggcaaaaacctatatgctactgcggacgatggttattatgcaaaaatactgaaatggaataatagtttaaaagtatgggatcaacttgcgagttttagaggcgggccaatttttgatttaatcaaaacaagtgataataaatttgctgccggtggaggagaatcacgcagatatgggatcagttcaacaattttcacatcaattggcggtgatgcgaactggtcacagaaagtcagtggttataaatccaaagagtcaagttacaccacgggtggctacttaggtgtcgtgtacactggagttgcaattgatgataagattcttatgttcggtaactcatatgctacaaactatataagtgagtcttcagatggtattaaatttaccagaaaaggaagttttgatggtgaatattttgatgctatttacaatggagataaggtggtggccgtaggacaacaagcaggagggacatttagcgattatggtttagttgctgtttcatttgataaaggcgaaagttttcaaacgacggtactggggtataatgctcctctgaattctgttacttataaagatggagtatacattactgtaggagatcttggatcaatttattattctgaggatgcgcacaattggactaaagcatcttcccctacagccaacaaactaaatgatgttgaatgggattacgtaaataaacgttttgttgcagtaggggattccggcactgttttattctccttagacggaaaacgatggatttcagtaaacagcggaataaaaaataatattaccaatgttgttatgatggaaaactcataatgacaaatgaaaaaagcaatacctttttaggtattgcttttattatattaattcgactaattctaccacttaaatcagctgtttaattcgtgaggagagttatatattgaggtatattaagttacttagctatacttttttgcagaactatgtgccaaacatagtatcctcctcctataaccaagctgaatatgttccttaattaataattagtggcgtgttgataggctattttagttttgtaattagtctataaatgctctttaatattttgttaaataatgtatgataaggaagtggggggggatgaatatgaaaaagatagggttgggtatcgcaggagtttttttaacatggtgcttggggatcggaactgtttcggccaaaatgacaaaagatgaacataaggtcagctttaaaatgacagagaatgaaacaggtttctttatggctgacgacaaaaaccttcattattggccgactaagctgggatacaggttcaccatctacaatgctgacgggtgtacattgaatatcaaactgcagagaattacactggcaggagatgattttacccttagtgaaaagaatttcacgggtaatcatttgaacttgagcgcggctgataaggtgaatggtgatgcaaacagaaatcattacttattgatcacaaaaggagccggctgcggagatgtgtggattaaaggcttttacggattcgaacacgatgagccggatgcagattggtgagcgatacacagtcaaggtatttccttgaccttttttaatggcaaaaaatttctggatattaagatagtgaattgatgatctgccaaaaaaacatagatcttttaaagtgatggatatatactgattttaaacaataggaaaaaaatgaaaaatatatttttataaaaagcaggtgaaatatatgggagcggcgacttggagcaaaaggcaaagctatacctaaacattggttttttcaagtttgtcgtatggtttgatcttcgggctatatatgtttgtatactcgggttttgtgccatttgcattggttactgtggttatcattgctttttacgcatttattacttactttttgtttgctgttcctgtgcaactatggctaagaaagaagcctaaaaagtttagcttggttcatcttttcatttatacagcagtcgcttttttagctgtgttcttgttctggcacatagataatccgtcaattgatttcacagttttcagaagtttcatttattacataatgagcattgttgctgcgttcatatattggttctgggactctatatttctgagaaattacaatgttcactgcaagtaaagctggtgttccaaaagaaagcgggtgaggaaaaatgaaatacattgagttgactagaggcaatattgatgacaatcatatttgctgtgcattaggtacgaaacaatatgaggatgcggtaaatgaaaagaagagctggctcaaggatcggatgattgatggcttggtgttctatcgcctaaacgaacgggcaaaagtttttattgaatatttacctgcagaagaagcgtgggttccggtaagcgcacctcattttatgtttattaattgtctttgggtctcaggtaaatataagaataacggacatgcgaaacacttgttagaaaaatgtgtgtcagatgcaaaatcccgcggtatggatgggatagttcatatagtggggaagaaaaaactcccttatttaagtgataagcatttctttgaacatatgggatttgctgtgcaagatgaagcagaaccctattttcagttgatgtcactgacgtggaatgaacatgcatatcctcctgtatttaaaaaacaggtgaaaagtaattccgttaatgatgagggaatcacaatattttatacagctcaatgcccatttgcagtcggattgttaaaggatttaaaggaactgactgaaaagaaaggacttcattttcaggcccggcgaataacgtcaaaagatatggcgcaaaaatccccggcagtttggacgactttcagcgtgttttataatgggacatttctcactcatgagatgatgagcgtgaataagtttgaaaaaatactcaataagcttttaatggcttaactttgttttaattactattcctcgtttctatattcgatactgagggtttttcacgaaaattgttcagtactttacatcgcgggcggcaaatgaatgattattgtttttgacaaagatgataacgtccatcattatagtaaaaatagattgagataagttcttcaacaaacgaataagatctgttgaagaagttcttttcaaagatcgataacaatgaaacaggagactgcaaatgcaaaaaattgaaacccttcgcttaattttaagaaattttaccgagagagatgcgcaaggtctgttggaatattctgcacatccgagagtgaattgctttcttgatgacagaatgtctacgttagaagaagctgccgtaaacgttcaaaaaagaagccgagatgactcttatattgcagtttgtttaaaagacagtaatgatctggtcggagaactattttatttaaaagaagagccagatacctattctgtttgttggaatttcaatgcccgttttgaagggaagggatacgcaagtgaaagtgcgaaggctttctttgagtatctctttatgcaaaaagaagcaagaaggctttatgcatatgttgaagatgataactgcaggtcacaaaaattatgtgaaagattaggaatgcgtaaagaaggttattttcttgaatttatttcatttactgcacacgaggatggaacacctaaatatgaaaacacttaccaatacgcattgctaaagaaagaatggttaaaacaaaaacatagttaatagaatttgtggggaaataatctcccctttgtcgaaaaaaccttgctgaaagcaggtttttttgtatttaagttaaatacttcattaggttaccgatcataccaatggattatggaattgaaaaaagtacttagattagtaacgatcaaaaagattaagcttgaaggttgggaaaatcatgaaattcattaaagcaacgttgtaaaattggagagaggatgaatgtgatggacattttgcagtttagcgacagaaggagcgggaagtaatcgaatcagcaatgttcaattcattttgatgaatttaaagatgcgctcgagaatggaaaaatggttgcgaaagataatatgcttttgagaaatcaagcaattaacgcttataaaacatctatttaattttaaatcggcgtttcaggtgaactttatatgatttcttttttcgtaaacatatttaaaaacgaaataagaattaaaatatgcagacaaagcagcgaagcatatcgcataaaaggtgttatcagaagtatgaccgttcctaaaaataaaacttatgaagaaaggaactctaacgtgaaatcaaatttagtttcgtttctattagcattgtcaggatttatattcagtatttatatgcagtcaatggcttactggagcaatgactctatgctgtggtattgggtcggtgcggttttgtcgtatctatttgctgcaggatcaatggttactctgattcttaacaaaaacaaagactcaattctaacaataagttgtctcattttaatgattgtaaccgttatgcttattttagtcacaactttttggacgacttttatcattattgcatggcaatctgggatgtgaagctaaggggaatatgatcttcttagtatttttttattcctgggattagaatccctttttattattctttcaaattaaatgtaacaattctaatattcatacgttctaaatgataaaggcgggatgtcatgaaaaaacgtaaagtcattaaaaaattgctggttattatcactgttctcataatagcagccggatttgcactgttttctttaatttcaggagaaaaagttaaatatatcggctatagccaaagcaagactgggaagcgtcaatcgaaaaatcaggcaagacatctatcggccctaactatttcttgaatttgtattacagaggtaataaagtgaatgaaaagaacacggtgattaagagattaacattatttgttgacggccggaaatatggtgaagataaagactatcatctttcagaatacaccggagagaaattagaaggcggcggaacgggagaagaccatattcaaacgtttgaatatatgccggaaaatgaagtgatcggtcatgaaatcactgttgaagcagcatggaaaaccgatcatgagtcctattcagaaaaattcaacctgaaaagaacgcattggtatgactgaaagaataaaaagagggcggtataaccctctttttgaccagagcctttatttttgactgtttttcctcgatgtgctgaagtcgataaaagaggcattggagccgataaaattacttactaagacatacataaagaaaccattaaaagctccctgccggcatccgtaaaaaagaatggataatgagataagcaatacagccgtaagcaagtctgcagccagacctattttacggtgagactgaaaatatgctcttaatcttctggtgttgttcaaagcggacacctcttgatgctcatgtataagaaaataataccattgaaatatatgtaatatcaatgaatagggttggaacggaggggttcaaagttggggcgatcttgtgtaaaagaaaggatcaggatgaatgtgaccagcatccaccctgatcaatggggttcacagtgttctatttcattgtattccaatcggaataatattacaagggtgaaaaagaaataagcggaatgttttcggcttcttctgcttctagagcgggaaaaggaaagtgagatgtttgaatgaaaataaatgattatctgaaggaaaggtttccgactttaaaattagtgcccggcatttatcatcaatgggacgtgggaattcatttttctctcggcggcaatatgtatcaatttaatgaaagcggtgctttgaatcttgagtattttcagcttgtccatcatcaaaccgcagcacttttcaatgagctgtttgaacatagcgatgacttgtttcttgttgccaacgtgtataagcacaaaactcaaggtaatcacgcgagaaaattaaaggtttataagccgtttctgaagtgtaaggatgatttatatcggattcaagtgaagacctgtccatgcccggtcgaagaagaatatgaaatgcagcagttttctctattatgtaaacggaaagatctgcgtgttccccaattacttaaggcagccgtccacgaagattttccgctgaagccaaggttcgggggctgttccgttgggtatcctgatgttttctttgtgaatatgacaaaagatattattttctttctgtatgatgacagagggtgtgaagtcattgctcttgatgccggaagaatacgaaagctttatgatcaatatcacgattggattgaattggactgaaaatgaacacatgaattcgaatccgcttgtgccggctttgttcttgcctagtccggctgcatgagtataatgggcagaattgaaggacgccagaaacttttttttctctcataccgaccttctgcatgttaagcttctgtatttattttgaacgaattcctatttgtaaaacggctgaatagaataacataaaagctttttttacacagtgcaggaggagagaaatgtgagggctgaacaccgtgattgtatggaaattggaatttattcatttgcagaattatatcccgatcctctgacagggaaaacagtcagcgcaaagcagcggatagatgaattgatgaagctggcgaaactggctgacgacgcagggcttgatgtattcggtgtaggcgagcatcatcgtcttgattatgcggtatcttcgccgccggccatcttatcagcgatttcacagatcactgaaaatattaagctgaccagtgccacgactgtattatccaccgcagatcccgtccgtttatttgaggattttgcaacgcttgatctgatttcagacggccgggcggaaatcattgcgggacggggcgcatttttagactcgtttcctcttttcggttatgacgtaggccattataaagaactgtttgaagaacacattgacctttttttaaaattaaattccggggaagaatcggttacctggaaaggacgttaccggccgccgctgcgcgaggcagaaatttctcctcggccttttcgcggaagcattccgctatggttaggtgtttcggggactccggaaagcgcagaacgggccgggcgtgcaggtgcggggttggcattagctgtactgagcggtgatccgatgttatctaagccgcttgttgacaaataccgggaagcggcttctaaagccggtcatcctccggaaaatgtgaaggttgccgtaaccggacatatgttcatttcaaaaacgaatgaacaggcaatacaagaattttatccgtatcattcaaattactggtctcacgttcattcatatcacgggatcgatgagcctttaacgaaggaagactttgagcgggcgtccggaaaagaaacagctttatttgtgggaagctcacagcagatcattgaaaaaatcatgcatcaatacgagttattcggacatcagcgatttctcgcgcaaatcgatataggaggtatgccatttaaaaaagccgcggaaaacatcgaacgattagcagcggaagtagcaccggttatccgaaaagaaaccggcaaatccagcgaatgaagttctgagcaaaaggggcgggccggtcaatcgcggattcgacaacagaatcggcccggctttttctttatgattataaaaaacaaagggaaaagcgccaacctcattgctttttcctatcaagaaaaggaaggtcatttcaacctctatcgtgaagtgtatacaccgaaaggtttttattaacaaaagagggaggatgatgcagtaatgaagggtttagtcaaagctgcagttttaactgttactcttggtattggaggcgctttctattcaagtggtgcatctgcgcacgggtatataaaagagcccgtcagcagagcgtacatgggagcattagagaaacaaacattgggctggacggccgctgcgcagaaatatggctccgtcattgataatcctcagtctgtagaagggccgaaaggatttccggctgctggtccgccggatggaagaattgcgtctgcaaatgggggatcgggacaaattgacttcggtttagacaagcagactgcagattattgggtaaaacaaaacatccgcggcggttttaacacctttacttggtactacacggcccctcatgcgacatcaaagtggcactattatatcaccaagaaaaactggaatccgaataaacctttgtcaagagatgaattcgaattaatcggaacggtaaaccacgacggttccaaggcagatacgaatctgactcataagatttttgtgccgactgatcgaagcgggtatcatgtcattttaggggtatgggacgttgcggatacttccaatgccttctataacgtcatcgatgtaaaccttacacaataatctatgaattactgatcggctgcatgttgatacatcggccgatctttttagttttaatgtgtgaaagaaaaggggaaaaacagcagagcgccataaacatttcatttatggcgccgtacgatcatggaggtgctgctgacatggatgcggaggtaagaggattcttaataaccgccgaggaaagaagccccaacgatgattaataaaatgaatagcaccacgattaacgcaaaggagctaccataaccacctgagaatcccatataatctcacctcctaaagaggattaatacatattatgccgaaatgaaaagtttgatagggatgctagtttactttttgaaaaaagtttttttagtctatatttcctttacatgaccatccgttaaaatgagtaaaaggaggcatcgtactgcttcctgtaatagaaacgggtaggctcatacattgagaagttgcgaagaggatgcgcagctggcttgttttttaaaaaatgaaaatgtaacacgctattaggattggaaccttttgattcaacggaacaggctgaagaaatgattggttggtttcaagagcagtatcatgaaaaaagggaatgtgatggggaatcgagaaaaaagatgcgaagggcataatcggaaccatgtatcaaaacggattgcctgatgatacacgcgtatactccattccgaatgggaacgttaacgatctaaatagaagaacttcaagtgttctgcggtaaataaaaaaagccgatgaaggcttaacatggattagacgctgtaaagcatttttttgctgtgctttctgcagacggagtttgattgtaagaaacgattccgataatcactaacaagatgatgaacaccaatatgctccacaacactatttttaaagactttgacatggtataccctcactttgaaagactttaccggggctgcgatcggagcccgcacttcaagtatagtcgttataacggtgaaaaatgtgcagtccagttaaaaaaaaacttgcgggcgctgccgcaagttttctccgtattaaggtctgtggaattcaatatgctgattatcacgatcgaaccaccctctgaatgcccaattgatccagcccccgtctcctttgttatcgaaggacccgtcttcgaagacccagattccgtaagtaataccgtcataaacggctgatccgtaaaactgaacgccgttaaagcggtcttcatattcttgatttaaattgaacaccatgacgttgtacttctgtcctgatgcgtaaaatgttgtttccatgacattttttacccagccggttcggttttgatctgacttaaccgcttcagcaatgcgatctgaaattccgagaacatctacgtttacgttcagcccggcatcaacacctgctgcttttacgttttggtctgctgtttgggataatttactttctaacggatttgcaacgggtgaaacgtgaggcgcgtttgcgtgttcagactgactggctgctgaggcactggctgtgaaaggaattgttagagataaagctaagcatgatccgactatcgttctggcgattttcatggctatgacctcctgaggaaatttttaaaaattgttgcaaattcatggtatcgcagaaaaattgaccaagcaaagagtagattatctcaaaaatcatgtcattctatttgtgttgttttctgtaaatgaaatacttttcattaggcgaaaagggaagaaaataatagagtctttttatgtattgtgataggatgaccggattttgggtgaaaatagcccggagaaacgccataataagaaaaacacccggagtttaccgggtgtaaaaagtgttgatatgtcaagttagcagcattttttacattttttgcattttcttttataaacaacgatgtaatcataatcaagatgctttttatcttgtttcttctttttttgtttaggctgctttgggtggtgatcataatgtccgttcatatccatatccatatccatatccatatccatatccatgtccatatccatatccatatccatactcatattcctccttttttcatctgacggtagtattctatgacagaaagcatgaatggcttggacaaatgaaacggtatgctgaaaaagaggcatctcattcggtataaaaaacaggatcatacccgcccgatagaaaagagaggagatgatcctgatattgagatcctatttgataaccgcaattgcaatgccgtaccctttttcagaactgtataaggctgtcagtttcaataccttccagccttccgcggctttagtcccgattccgttatgagccgtgatataatctcccgggctgaccgtactgtcgacccgtacgtaatgccggccgttgagtccgacaatgtgccattcgtctctggccgctcgtgcttcatagtcagcttcaagagccggactgcagtctgggttttgtttcggcacgcgtaccgtttctcctgtttcctcgtcagtcacattttcgtatatgaaaccgccgaactcgtttgtcaaaaagcggctttgccatccgaagcttgctgctcctgagataaaagcggctgtttctgaaatgacgccgagcatgtaatctccgacgtgagccgattcaattttttcgcctttcactgtgacgattgtcccggcgggaattgtctggccggttacactttcaaaatattctccgtaccctgacagggaagaggtgacagctccggcgaacgtaccgtggccgcccgctgaatccaatttccatttgatggactgatgccctccggcaaccgtgtatggttcttccaatgtaatgctttctgatgacagaatcgttctggagactttgctgcccgtaatatggacattgtttgaagcggcgataaatgcccttgaaccttcagaacttgaacctccggaagagctgatgatcgcatttctgtcacctctggctgtaatatcgcctgttcccgcaataacggcgcttgtcgggttgaatgcaaaaccggagctggtcgcgagctgtgcgcctccctttaaattgacggggatctgctcataagtctgtccttttatagatgcggccgcgctgtaaccttccgcttgcaccccgagaatgacggcctgactgttaggggacgtaattccgacggaaccgccgtctccgatcatcgtaccgttcataatatttacgttatattggcctccgccgattgagatgcctttaggagatgacttgtatatatcaaaatttaaaattttaacataatcggttttatttgatccgccggatatattgatgtcaacacctgcttgtgtaaagccgcgtattttaatgccgttgatcgtgatattttgactgcggtattgaagagccactactggattcccgccatagtcgtatgagggatcaccaatagctgtgaatccgtttacattaacgtttttataggcagagatgaccagcgccctcggggtcacaccgtcatagagagcattgaataccggttcaatcgcggtgcaatcggttaaagtaacatcataagccgtcgtgctttcggggtctgaggcctgatgatggccgatatgacgaatatcaaatgaacgtacatcacgatacgaaacatgaccgataatatgaacattttgagaagccggccacaggctgtgcgcctttacctcaatcccgcggatatttccgctcgtatagttatttaaaagccatacatgtttagagccgtcgtcaatttcaatgccgttcgagtttgcgctgccctcagcatgctctgtgccgcgggggtttccggaatggcagttggagatgaaaatatactcgctgtaatgggtggtaatgccgtcgtctccggcgccgtatgccacacagttatcaatccatatatatcggcagccgtctttcgtccattctgtttcaggcaaatgatcgtaagtcggagatgtaatatcaataccatggagacccgcgttaaccgtttcaacattcttaatccagccgtattgcacattagcaaacgttaaacagctggaaaactgtcctccggggttcctgaccccgcattgacgatcaggattccagtctaaagtcatgttttccacaaaaatattacggtttccattttcgtaatcatcgttagtaatgacccattcgaatgcgggagtgtcctcatgaagcttaagcacggtaatcccttgtccctcaccggaaatggtagtccatgaggggagttttatcccttgaaccaaaaattctcctgcgggaacatttactttgacccggccgttcccgatcgctctccgaaaagcttctgtattgtcccggccgtcagggaccgctccgtagtcctccacattcacttcccgggtgattttattcataagcatttcgtattctgtatcaagccgttcttttaaaagtgaggtgaccattccttccgccgtcacccgggcatctgcgatctcaagattatcatccgttgcggaatgcttaataaaattctgcatccttgctttgagatgctccaattcagagggctgtgcagggcgagactgcaatggggcgtttaaagacggatcaggaaagtttttaaattgaaccattctaaagacacctctttcttttgatataagcgcctgaggcaggggacagaaaagagtcgtgcgtcctttaagcgcttattcttcaaattctttattcagaacgaaattccttttgaaaccaaggtgaaattttaaaaaagctctgttgaaagaacggatataaagctttgtattattgtaattgaagctgtcatgtgaaaatggaggaaaaactgataggaggggccctcattttaggtttattctcattggcttcgcagtgcttcctcttcggctgtatatacaccaaaatcaacattcttatcagttaaatggtataatggggcacggattggtcatcaatacgactgaaatagggaagcaaaaggagcagcgaacatgactttacaaatcaaaattaaatattcagatgatacgcaaacgagaatcaataaaattgaacagggcgattggattgatttgcgggcagctgaagatataacaatcaaaaaaggtgaattcaaacttatcccgcttggagttgcgatggaactgccggaaggatatgaggcccatgtcgttccgcgttcaagtacatataagcatttcggtatcattcagacaaattcaatgggagtcattgatgaatcttataaaggcgacaatgacttctggttttttcctgcattcgcgcttcgggataccgacatttccaagggggagcggatctgccaattcagaatcatgaagaaaatgcctgaagtggagctgatcgaagtagacaagctcgggaacaatgaccgcggcggactgggatcaacaggcacgaaataaaacgaaaaaagactgcttaacagcagtcttttttttatggaaacagcagttacattcaatttgtttcggggattcttgaattgggaaatcatacgtcacgttcgaatttgacttcgaaataagcggccgctccgtaaccgtctatgccggagcaaatatttgagccggacgccagcccagctcagcatattgataaaatgatttccctgcagtcctcactctcctccaaaactggagaagggtttcatttttatcatttaagccttccgtctctttgaacagaaagacttttttaggttaaaggatagaagttgttttgatgtttttattcttcaagatgaacggaggttttgtccaacgtatataatattgtgacaaaagtgtaaacaaaagaaaggatgatgttatggcaaaaagggttaggagagtagaccgtaaagcagctggcaaagaggcagagcagaagaaaccgtccaaagtcaccctgttctgccgttcgcttcaaaggctgaagcatttgtattgtaacataaacatacaaatgccatcaataaccaaaaaaggaattttagttttaattttaccgtttttgcttctgccgttctttcgggctgatgccgcttcagatatttacggcagtttcgaggaattaaagctgaatgaaaatccttccgatttttccatttcaacgcgagagcatgacccctctgtcctcatattagctatacacggcggaggcatagagccggggaccagtgagttagccagagaaattgctgaaaaccggagtttatatttatttgaagggttaaaatcagccggtaatgcggctctgcatttgacaagttcgcatttcgatgaacctaaggccgtgcaaatggtgaaagagcactctcatgtcatttcattgcacggttacggcagtgacgataaaaagataaaaatcggcggtacggacagagaacgggccgaacttttgaccgatgtgctgaaacggcacgggtatcctgccgttcttcttggcataaatgataaatatgcaggcgtcagtccgaacaaccttgccaatcaatcttcatccggattgagtattcaaatcgaaatgagcaccggcttcagaaaatcactatttgacacttttacgctgaaaagcagagcatccacacaaaatgggaccttttatcaattcacaaaaacgatttctgattttatcagtgacaattattaataagcacgcctattttgtcggcggggctttttcttttgaaatttatgaaactttaagttcttaagatcgtatacataattgacaggatgaaagaaaagaggtgggcaaatgaaagtgatgatcgggtctatcattcttcttgtcatcatcggattcggtttatggctgatgcttagtccaatctttaaacaagtgggaagcggagccaaaaaattcaaaaagtcatgggaggaagaagatcagcatgagcgaaaataagcgcggaaacacaaaaaaaattatcggcggtgtgattataggtgcagcccttttaattgcgggcgttacagcgtcactattcattgaaaaaataccgaatggttatgtcggggttgtatactcaccgaatggcggggtaaaatccgacacattggaccaaggctggcacttagtcggattatttaataaagtaacggaatatccggtgcgtatgcagacagtgaataatgaaaatataaaagtggcaacctcagacggtaaaaatatagaaatggatatcgcttacaactatgtcgtgcagcctgataaagtagtcgatctgtttaacaaattcggagcggtagacgttgaaacgattgaaaatacatatttaaaaacaaggctgtgggatgcggcgcgaaaatcaatcagcaaatactcggttattgacacatacgggcaaaaatctgcagaagccgctgccgatgtgcaaaagagatttgctgatgatatgaagagtcttggatttttaattgatgatctgacgcttggcgtaccgaagccggataaagccacacaggaagccatcgatgcaagggtgaagtcttcacaggaacttgaacggacacaaactgaaattaaaatagccgaagccgaagcgaaaaagaaaaaaattgaagcggaagggatcgctgattacaaccaaatcataaagaaatcaatgtcagatgaaatgatcaaatataaatggattgaaaaatgggacggaaaaacgccgaaagcgacaggcacagactcactgctgcagctgcccctggacgatcagaagcaaaaataaaaagagaaggaggcgattgcctcctttttatgttttttcctgtgggtctttttccggcactaattcttcagacgcctcggtttgatagctccatagcgtgctatccgtctctgttgtgtcctgataatcttcgggaagtacatattgctgcaaataccggtgaaaaaatgcctcaaaaacagaaatgcaaagtgcagagataactgatgccgcggcaggagagacattaaatccgccaatgttcataaggaatatccataatataatgaaagaaattccgaaatcagctgcaacggctgtgaaattgcttgttctcggcagaatcatgcaatcacccgcaaaataagtgattaaacttaagatcactgtaataaacagaacgtttaaaaaggttacttggtacataagatccaaaacaatgtacagtaaagcaagtgtgagcgccgttttagaagcgaaagcaattacgtgtttcatttgaaccaccttcgttatttcgtttagtcttcattgtaagcaatccgcaaatttttaaactggtatatagtggttataaagtatacgttttaataaaatgtgtatagacatcacaggattcgcaagttaaaatatgtaaaaagggggatgcaaatgaaaaaatactggatatgtattgctgtttttttattatgttttagcggaatacactcagctgaagcggctaccactgaattcggatcaaaaacaagcttcactttggagggaaatgcaaaagagtttcatattgaaaatccgggggctgtagctgccgacgattactatttaggatataagttcaccataatgaacaactcttcgtgcggtttaagcatgaaactccagcggatggcgctgaacgggaatttttatacattaagttctaaaacctacagcggcagctggttaaacctcagtgcccaggataaaaaatcaattgatccgtatcacaaatacagaattctggttgaaagttcttcaaacgtctgtggccccgtctatattaaagggttttacggtgtagaatattatcattttgattgaaaatagatactcgctaaaggcagcgggtttttttatatttaaatataacttattgtactatgtactaaatattcatacataaattttaatgcacccgtccaaagaaaacataaacaaaagtaaattcatcacgcacaaatatacaaagttgaaaaacgaatgaaaagtttcctgagggaaacattattagttgacttcaaaagtgtgatgtcggataataaggatgtaagtttttcctccttagcagattcgtttcttaagccagggcgaatctgctttttttatgcaaaaaaaccccttacagaggggttttttacgataaatgaagtttaatagaattaatgtacggctctgaatacgccgataactttccccaaaatgcttacgttttgcaggataatcggctccatcgtcggattttccggctgcagccgcacataattgtcttctttatagaagcgcttgaccgtcgcttcatcatcttcggtcatagctacgacgatttctccgttattggccgtgttctgctgtttgacaatgacgtaatctttgtcaaaaatgccggcgtcgatcatactttctcccatgatttctaacataaagacatgttcgcccggaggaaccatccggtcaggaagcggaaaatactcgtcgatattttcaacagccgtaatcggaatacccgccgtcactttcccgatgaccggaacgtttacgacctggcttttcggaatgtggacttcttcttcatccaatatctcaatcgccctcggtttagttgggtcccgtctgatcaggccttttgtctccagccgcgccaaatggccgtgcacggttgaactggaagccagtcctactgcttctcctatctctcttacagaaggcggatatcctttcgtttttacctcttctttaataaaacgcaggatatcaagctgcctttttgatagcttcgtcatatttcgcacctcaaaacgtcgattttaagtagattatagcatgattttcctgacagtacaaacataggttcgaaaaaaacgattgacagaaacgtttgttcgtatatactgaaaggtataaaaagcgaacaaacattcttatcggaggttgtttacatggcgaaagaatctattatatttgtcgggctgtttactgcgattttaagtgccgctattttacttgtctcatgtgcgggaaatgatcagtccctaagccaatatgttaaaataaaggttcaggacggcgatacactctggtcacttgcggatcatgtagcagaaaagaaacacattaataaagaagatttcattgagtgggtgacggagaataatcatctccaaactgctgatataaagcccggagacgaacttattcttccggttaagaaaaagcatccggccgtatatcagctggccattgtcaattagagaggaaagagagaaatgaaggcgctcatttatgcccgcgtaagcacaaacaaagaacagcagcaaacgtcattaaaaagacagaaagaggagctcagtgagatcgctgctgcaaacggcatggaagtcgtgaaagtcatttctgagaaagccagcggttacgaaatggaccgcgacggagtatttgaaatgcttgatgaaattaaaaaatcacatattgacgcgatattggtgcaggacgaaacgagattgggaagaggaaacgccaagattgcgcttttgcattgcatttacagggagaacgtaaaaatatatacgacggctcataaaggtgaactggagctttccgaagctgattcgatggtactcgaaatcgtcagtatagttgaggaatatcaaaggaaaattcacaatatgaaaatccggcggggaatgaaaagagccgtgaaaaacggctacaaacctgaacggaatctgaaaaacagacatgaaaacagcggaaaagaaaaaaaagaggttccggtttcggaaattatcaggctgagagccaacaagcttacctttgcagaaatcgcagcgaccttaaggggattcggctacgatgtgtccaaagccacggttcaccggcggtttcaggaatataccgcagacacagaaggcagctgacgcgcatcagttgtaaaaaagactgcgttttagtagtatataatcaacacgcaccaaaggagcttattatgatttctaaagaaaaaatcgcaagaattaacgaattggctcaaaaagctaaatcaaacacgataacggatgaggaaaaagctgaacagcaaaagcttcgccaggagtatttgaaaggattccgctcctcaatgaaaaatacgttaaagagcgtaaaagtgattgatccggaaggcaacgatgtcacccctgaaaaactaaaaagagaacaacagaaaaataatcttcattaaacagaaagaatacggcaatacgtattcttttttcgtatatactaatatcaggatgtgctttacgacaattttcaacaagtttatctcaaatttaagctgaaagagttgagaaaaagtcagcatcgctttatgatgaaaaggtacaacaataaggaaggggattataatggatacaattgaaaagaaatcagttgccaccattcgtacactatctatagacgcaattgaaaaagcgaattccggacatccgggcatgccgatgggagccgctccgatggcatatacgctgtggacgaaatttatgaatgtaaacccgcagaatccgggctggtttaaccgcgaccgctttgttttatcagcaggccacggttcaatgcttttatacagcatgctgcatttaagcggatatgacctcagcattgaagacttgaaacagttccgtcaatggggaagcaaaacaccgggacatccggagttcgggcatacagccggagtagacgctacgaccgggccgcttggacagggtattgcaatggcagtgggaatggcaattgcagaacgccatctggctgagacatataaccgtgattcattcaacgtagttgatcattatacatacagtatttgcggagacggcgatttaatggaaggcatttcttccgaagccgcttctcttgcaggccatcttgaattaggccgcctgatcgtattatacgattctaatgacatttccttagacggcgatttagaccgttctttctctgaaaatgtaaagcagcgttttgaagcaatgaactgggaagttctttatgttgaggacggaaacaacattgctgaattgacggctgcaattgaaaaagcgcgccagaatgataaaaaaccgacattgatcgaagtgaaaacgacaatcggtttcggttctccaaaccgcgcgggcacatccggcgttcacggcgctccgttaggacaagaagagagcaagctgacaaaagaagcgtatgcttggacgtttgaagaagatttttatgttccggaagaagtatacgggcatttcaataaagcggtaaaagaagccggctcgaaaaaagaacaggaatggaatgacctgttcgcggcttataaagaaaaatatcctgagcttgctgaacagctgtcactcggtatgaaaggcgagcttcctaaagactgggatcaggaagttcccgtttatgaaaaaggcagcagccttgcttcccgcgcatcttcaggtgaggtgctgaacggaatcgctaagaaaattcctttctttgtcgggggatctgctgaccttgcgggttcaaataaaacgacaatcaaaaatggaggagacttcacggccaaagactacgccgggaaaaacttctggttcggtgtccgtgaatttgcgatgggcgctgcattaaacggaatggcgcttcacggcggcctccgcgtattcggcggcacattctttgtgttctctgattatttaagacctgccattcgcctggcgtcattgatgggtcttcccgtcacttatgtattcacgcatgacagtattgccgtaggagaggacgggccgactcacgaaccgattgagcagcttgcttctttacgcgcacttcctaacctttctgtgatcagacctgctgacggaaatgaaaccgcagctgcatggaaggttgccgttcaaagccaagatcatccgacagctcttgtattgacacgccaaaacctgccgacgattgatcagcaggctgaagaagcgtatgcgggcgtggaaaaaggggcttatatcgtttccaaagcccaaacggaatcaccggccgctcttcttttagcgacaggttctgaagtcggacttgcgatcgaagctcaagcgaaactggctgaagaaaacattcacgtatctgtagtcagcatgccgagctgggaccgctttgaaaaacaatcggctgagtacaaaaacagcgtgcttcctccgaatgtgacgaaacgtcttgcgatcgaaatgggttcaagcttcggatggggtaaatttaccggtcttgaaggagacgttctcgcaattgaccgtttcggtgcttcagctccgggagaaacaattatgaaagaatacggatttactgcaggaaacgtggttgaccgcgtgaaaaaacttttaaacaaataacgagacaaaagaggatgagtcaaatcatcctctttttcctgtttatgcgacaaaaatagaaggagcggcgtaacagtaatagacaattctttcttttctccttttgtataatagaaagcaataacgaagcgctgtaaaaggggatgaggaaatggaacgtcattactatacgcacctgataaaggatgagtttgccaaccactacttcgggcgggaaacggctatgtttgagttgtttcgagactatcattggacagatctgacgccccaggaatatcaaatgacagaaaagcaagttcaatatataacggaaccgattccggtgatacatatgcatcagcgtctccagctgcatttaaaccgaatgagttacagccgtttggattccatttaccggcttacactgcctggagaaaagggccgcgccaccttcatgatgaaagacagtttaattgagattgcggcttcgggagattatgaggcggaaacgattttctttgagattctgcgtaaaatcagcccctgttttcttgcaatggatttcaagacacggcgctacgggtggttaaatccggtcagagaaagaaattttgtttaaaaacgaggaaaaagagatgtaaatgttgtataatagcctttggtttagtacactttaaactagacaacatgaaggaggaaataaaatgactttatgggttggcatcctagtgggcgttgtcgcattgctcataggtgttgcactcgggttttttattgctcgtaaatatatgatgagctatttgaaaaagaatccgcctattaatgaacaaatgttacgcatgatgatgatgcaaatgggaatgaaaccttctcaaaagaaaattaatcaaatgatgaaagccatgaataatcaagcgaaataatacgtacagattatgatatagagatacatggttataaaaataaaaaacccggagagggttttttattttggcgtcatgtttcaccccaactgccggtgtgcagttctttttggtattgtatgagaaggtggtcaagctcctggctgagttctatcgtaatgtttgatgtcattccgtttgtcatgacgattttaagcagctctgcccgttttttttcaatttcatttaatagatgctctctaatcacagggatatatcctttcatacataaatctttcacctgagtcgctattattatatccacatttatactgtttttcaaataagaaggagtataatatctcgatgtcaaattaaattatataagctttttctataaaaagtaatccttctcggaaaagtgttaaaaaaatgaaatgattttgtcataactcgaagggagtgtgtcatcgtgagttttaattactttctgacgtttggggccggatttctgtctttcatttctccatgctgtctgccgttgtaccccgcctttttatcttacataactggtgtcagtatggacgaggtgaaaacagaaaaggtgatgctgcaaaagcgtggcctcgtgcatacactttgttttttgcttggtttctccgtgatttttatcgcattgggatatggaacttcgtttatcggcagtttttttacccaatatcatgaagcgatccgccagtttggcgctatcatgctgatccttttcgggctgattactgccggtgtgtttcagccgaaattcatgatgaaagagcggcgcattcactttaagcgccgtccggaggggtttatcggttcggttctgatcggtcttgcgtttgcagccggctggtcgccgtgcagcgggcccattttaggggccgtgttttcgctggccaatacaaatccttcttcagcagtgccgtatatgtttttatatgttctcggatttgcgattccttttcttgttctttcattttttattaccagaatgaattggattcgcaagcatcagctgcttatcatgaaaatcggcggcattcttatgattctgatcggagttatgctgttttttaactggatgagctacattctgatcgttctgtcaaatcttttcggaggatttacgggtctgtaacggattaataacttttgaactattatatacccttttgtttttggtacaataagactagttaatgttaaatatgtggaggggaatatgacacgagttttagttgtagatgacgccaagttcatgagggtgaaaatcagagagattctggaatcggcgaattatacagttgccggggaagcggctgacggtgaggaagccctggcagtatatcaaaaaatccgtcccgacctggtgacaatggatattaccatgccggtcaaaaacggtatacaggccctgcaggatattttagcttttgacccgaaagcccggatcatcatgtgcaccgccatgcggcagcagcggatcgttctggaagcgattgaattaggcgctaaagactttatcgttaaaccgtttgaagcatctaaagtgctggaggccgtaggccgggtaacgggaacgtaaacgtgttctcttttcaaattggttttttttatgtttttggagtatagtatatagtatcaaactccgtgcaagcaaaggaatgataaagatgatgattataatttcatccgttattgcagcggccatggcaatttccgtgatgatcgtcaggattaaatcctccgacaagcccgcttcacctaaaaaaataattctcccgccgattttcatgagtacgggagcgcttatgttcctttttccgattttcagagtgacgggcgaagaatttttggaggccattacgctgggcgtgatcttctctatttttctgattaaaacatctaaatttgagattaaaaataatgaaatctatttaaaacggtcaaaagcgtttgtgtttatcctgattggtctcttggttatcagaatcgctatgaaatccattttgagcacgacgattgattacggagctttaagcggaatgttttggattctggctttcggaatgattgtcccgtggcgcatcgcgatgtttttgtcttaccgcaaactttcgaatgaactgaagaccgctgatattcagatgaattaaaacctttccgtacgccggaaaggttttttatttgagcagggcttgataaggagtaagatcaatctgtttttcacggagatgcttttttaaaaattgatgatcacgcttaggagtggccagtatgtaacccctgatgattaaatcacgatttatttgttcagcttcctccgctaaggaaagttcaccgatttttccggcgattttcgctttggctacatcccgaaagagctccggcacgggggcgaccaattcatccaaaaacgccttgtcaccctcattccataagtgcctgcttttttcaatataatagtcctgccaatccagttctgaccggccgtcttctttcggtaagcgttttaaaaattttcgaaacataaaaaacccgccgatagacagcaatccgatcatcacgatgacccaaaataaaataaaccacataaaccagccttccagcattgttctatctcctccttactttaaccatattgtaaacgaagacagaatagaagaacacatgaaaaaaagaatagaaaaaatgatagatgtccagtcattccggttggtagaacatattctatcgtatagtgattctgctatttggccatgggagattcactttgagggtatatgactgatatgaccggacaaaaaagccgcttccattgagggatgaaagcggcttttttatgttatagaggaaattgaaaggaaaatgaggcaggagtctcatttggctccttgttcatggagacggtcagaatatggttggtgaaatcagtgaaaatatgtttgtcattcagataaaaaggaagcaccatttgtttgtttaacgtccgttcaagcgttttaacagagagcataaattcattccccgaaagagtgacggttatcgcttgcacctgcttcagcgccgtcaggtcggcttcaatgatatattgacggcttgtttcatatagatcgatcggcagcgtctcgtcataccaagcatacgggtcctcgtaaaactgccgcagccattcttccgtatcatcaaattcttcagcgttttttgagtgattcatggaagcatccctccatattaaaaagccttgctataacgtatgcagaagctttgaatgggtgaatggcacaaaaaaacagacacggggtctgttttacatatcgtggcttgtattatgtttttgtcttgtatggttgcggttttttacttttttgcttccgctcagcggttccggctggccggggttatggcccttcggagcatttttatgcatatctttactcgtatttttatttgtcatgttaatgcctcctttttaaggtgttccggctattggtttgtttttctttttttattgttctgccgttcttcttccgtcaggacgagctggtcattttctatataacccgcgcctttgccttggcttttcgcatcattcatgccgttaatgacatgattggctttccgttttaccatgatcatcacctcaacattaatatggctctttacagcccgttgtatgaggcggaaaatcggacaaaatttaccgaaaatcatgctgataagacgatcttattgtatttaataaaaacattgatatttacttatgtatgattttatactaagatgaaattgtgagaaaattgtgatggaatgtgaacattcatctaaagaacgatcttgatcattgaagggggattttggagaatgacaaatcagcaaaaagtcgcaacacaagacgttttccaagcaagaaaaacattttcttcaaatgggaaaacatacaactactattcattaaaagcattggaagacgcaggggtcggcaatgtttcaaaacttccttattctattaaggttcttttggaatccgttttgcgtcaggtagacggacgcgtcattacaaaagagcatgttgaaaatttagcaagatggggtactgctgaattaaaagatatcgatgtgccgtttaaaccgtcacgggttattctacaggactttaccggcgttccggccgtagttgacctggcatctttaagaaaagccatggcttctgtcggcggagaccctgataaaatcaatcctgaaattccggttgacctggtcattgaccactccgtacaagtcgacaaagccggtacggaagacgcgttagccattaatatggacttagaattcgaaagaaatgcagaacgttataaatttttaagctgggcaaagaaagcgtttaacaattatcaggccgttccgcctgcaacaggtatcgttcaccaggtaaaccttgagtttttggcaagtgtcgttcatacgaaagaggaagacggagaacttgtgacatatcctgatactttggtgggaacagattcccatacaacaatgattaacggaatcggcgtcctcggctggggtgtcggcggtattgaggcggaagcgggaatgctcggccagccttcatatttccctgttcctgaggtcatcggcgcgaaacttgtcggaaaattgcctaacggaacgacggcgactgacttggcgctgaaagtcactcaagtgctgcgcgaaaaaggcgtagtcaataaatttgttgaattcttcggtcctggtgttgctgagcttccgcttgcggatcgggcgactattgccaatatggcgccggaatacggagcgacttgcggattcttcccggttgacgaggaagcactttcttacctgcgtctgaccggccgtgaagaagagcagatcgatattgtggaagcatactgccgcaacaacggtttattctatacgcctgacgcggaagagccgatttttacagacgttgtggaaattgatctgtcaaaaattgaagcgaacctatcaggaccgaaacgtccgcaggatttaatcccgctttccgttatgcaggaaacgtttaaaaaacatctagtcagcccggccggcaaccaaggattcggagcggatgctgatgaagagaacaaagaaatttcatttaaacttaacagcggcgaagatgcggttatgaaaacaggggcgattgcaatcgccgctattacaagctgtacgaatacatcaaacccttatgtattaatcggtgccggattggtagccaaaaaagcggtagaattaggcttgaaagtgccgaattatgttaaaacatcacttgcaccggggtctaaggttgttactggatacttagtcaactccggcctgcttccttacatgaaggagctcggatttaacctcgtagggtatggctgtacgacatgtatcgggaactccggcccgctttctccagagattgaagaagcggttgctaaaaatgatctcttgatcacttctgtcttgtcaggtaacagaaactttgaaggccggatccatccgcttgtcaaaggaaactaccttgcgtcacctccgcttgttgtcgcatacgcattagcaggcactgtgaatatcaacctgaaaacggatccgatcggtgtcggaaatgacggacaaaatgtttatttcgatgacatctggccgtccatggatgaaatcaattctctcgtcaaacagactgttacgccggaattattccgcaaagagtatgaaacggtatttgacgacaaccagcgctggaacgaaatcgaaacgacggatgaagcgctgtacaagtgggatcaggattccacttacattcaaaacccgccgttctttgaggaaatgtctgtagagccgggaaaagttgagcctttaagaggacttcgcgttgtcggcaaattcggcgattctgtgacgactgaccacatttctccggccggagcgatcggaaaagacacaccggcgggcaaatacctgcaggaaaaaggcgtttctcctcgtgactttaactcttacggctcacgccgcggaaaccatgaagtcatgatgagaggaacattcgccaatatccgcattaaaaaccaaatcgcaccgggtacagaaggcggatacacaacacattggcctaccggggaagtgacatctatttatgatgcctgcatgcggtataaagatgataaaacgggtcttgtcgtcctggccggaaaagattacggaatgggctcttcacgtgactgggctgcaaaaggaacaaacctgctcggcatcagaacagtcattgccgaaagctttgaaagaattcacagaagcaacctcgtcttcatgggtgtgctgccgcttcagttcaaacagggtgaaaacgcggatacactcggcttaaccggtaaggaagtcatcgaggtggatgttgatgaatctgtacgtccgcgcgacttgctgactgtcagagcaatcagtgaagacggtaaggtaaaaacatttgaagttgttgtccgttttgacagtgaagtggaaattgattactatcgccacggcggcattttacaaatggtgcttcgcgataaaatgaaacagtagcagtatgaacaaaggagagaaagcagtctgctttctctctttttatgcgggaggccttgagatgcttgcgaaatggctgggcggaatgttacttatcgggttgttagtgtatgcgggctggaacatttattctgtacaaaaaagtccgaaagaagggacggaagaagggatgaaagcccctgactttacactttatacattgtcaggaaaaagtatctccctttctgattataaaggaaaaaaagtgctcctcaatttctgggcgacgtggtgcaagccgtgccgaatggaaatgcccgatatgcaggagctgcagaaagaatatcctgatattgcggtagcagccgttaattttacatcctctgaaaaaaatatacaggatgtgaaatcatttgctgatcattatcagctgacctttcctattctgattgacaaaagcggaattaacggagatttcaacgtgctttcttatccgacaacatacatattagacgaaaaaggaaccattcagcatattcgcgtaggcacgatgacaaaaaaagaaatgaaagaaaaactggatctcaaatagaggttcagtttttttattgtgaagggcttaggttttgaaaaattggaaaaaatgaatgaaaacacggaggtgagaagattgaaaaaaatgcgaaaacgttcttttcatgaattggttatggaaaataaacgtgagctgatgaccaatacggaatatttgaatcagcttgaagaaaagctggagcagcggttcaaacaaaaataacctttaatttgcagtcatgtttgcacctccttttgcaaaatatactcttaaggagggatgaacatgggcataaacaagaaagacggccagccgcaatacgctccgagccacttagggacaaaacccgttaaatataaacgcaacaaaggggaaaagtttcatgacaagtcaaacggacatccgattgtcatgcagacgaaaggcgaataacatcatatcaaaggagagcagacattatgacaaacaattatcaaaaaccgaatccggatgaccgttccgataacgttgaaaagctgcaggatatggtgcagaataccattgaaaatatagaagaagccaaagaatcaatggaatttgcgacagatgaggaaaaacagcgcattcaagagaagaatgccagacgcaatgaaagcattgaatcgttccgcagtgaaatccaggatgaatcggctgcaagagaaaacggctatcaatcataataaaaaccagggaaacctggtttttttctctttccggctcgttgtgataaaatggggctaatctgataataagggagcagagaacgttgcatgtgtcaaaaaaagaaatagaagtgcgttatgcggaaacagatcaaatgggtatcgtctatcatgccaattacttagtctggatggaggtcggcagaacggcgctgattaaggaactcggattcctttacaaggatatggaagatagaggagtgctgtcccctgtattggatatcagcatttcttataaaaagccgctccgctacggagaaacggctgtcgtacatacttggattgaagaatataacggatttaaaaccgtttacggctaccacatctataatccggatcaagaacttgccatcacagcgacatcctctcatatatgcgttgataaagagagcttcaaaccgattcagtttcgcaaggcttttcctgattggcatgccgcttacgaaaaggcaaaaaaataaggagcggctgcagttatggcatttggaattacgcgtaaggaactggaaagatggaagcgggatgtatcggaagggaaaatcgcttttttaacgcattactggctggacgaccgctttccggaggctaagaccgtgacgaaggccggttcaagcgatctcaataaactgatcagatggggagcggaatacgggctgaagccggagtggattcaccataaaaatgaatttccccactttgacctgctcggtgatacgcaaagaagcatattagaaaaagaacatctgactgatcatctcaaaaggttcaggctgtaaaaaaaagaacgcatccgctgcgttctttttttcttacacgtaatcaaataccggctcttctgcctgatctgaatatgtgactgacaaatcgtgattatcaaagtaccataagtcgctttcttcaataaaaaaggtaatgccttcaacttccgtgctggtgccgatgttcatcggccggtcttttaaaatgccgagagaaaagcctttctgaacgttgctgcatcccccgtaacggacaaagaaacggacatggtcgcctgtttccagatcgagctcttctttgtaccaatccagcgcgcctttcgttactttcatgttcatccggaacactccctttttgtttctcatataaagaaattatctctattataaacgcatatggcattttgatgtcaaaattgaagtttcatcaaaaccatttgatcttcggttctgttttgtttataatccgtttgatgtttgccctgtgtctgtagataacaaacgcggtcaagagcgtcactacgactaataaataagggtcttttacaaacagacagtaaataatcgtataaatccctgttaacattgaagacagagaaacaaatttcgtaaggaataaaaatacgaaaaatactgcaaccatcgtaacgaataacagcggagcataaaacagcaggacgccccctgatgtggctacggctttgcctcccttaaactttgcgaacacggggaatacatggccgattactgctgccacccctgcgagaagaggatgaatggggacgtgcagtaaatatgggagcgccgcggccaaggtgccttttaaaatatcggctgcgatgacaacagatcccgctttaacgccaagcgtgcgaaaagcatttgtagcgcccaaattgccgcttccgtgttctctaatatcgatccctttcgcaagtttgcctacgattaaacctgacgggatgctgcctattacataggccaaaataatcaataaagcaatcaacatctacatttctccttttcaatgtcccttcactctattttaacacgagttgttaccgtctgatgacaagttttttgagaattaagctgacaaagcgctttttttgattccggcgaagcggtcatgtacaatatatcaaaaggagatggtaaagatgcaaaatccttcaaaatcagagattaaagaaatcctggaccggagcaaacggatcgcagtcgtcgggctgtcagaccgtcccgaccggacttcttacatggtttccaaagcgatgcaggatgaagggtatgaaattattcccgtcaatccaacgattgatgaggcgcttggcgttaaagccgtcgcttcattaaaagacgtggagggaccgattgatatcgtgaatgtgttcagacgctctgagcagcttcccggcgtcgctgaagaatttttacagacggacgctcccgttttttgggcgcagcagggccttgcaaatgaagaagcgtatcgcatgattacagacaaaggacggacggctgttatggatttatgtataaaagtcgcccgcgctgttataaaataggaacaaaaaaggcaaaaatccttggcaaatcaggggtttttgcttttttattgaaagaatactctttgcgtatgatgatgaaacagatacaataaagcatgaacagcttttttagaaacccctttatacaggggtttacagtctgtttgcgatggccggcataaagctatataatagaaagcgaactcatgttcttattcgctgaaaagggcaccagaaagatgaaaagccgttcgaatgtatgtcttgcggcctaaaaaacgagccattcgcttaaatatgttgcgaaatcaagcatattggttataattgtgagtccgaggagaattggaccgaagcttgcgcatactgaaaaacaaagacatgaaaacatttaaaaaagagaatgattaagagcaggttttttgaaaggggtttgtacgtttggctagaaaacagcaatttgattacaacgaagatgccatacaggtgcttgaaggcctggaagccgtcagaaaacgaccgggaatgtacatcggttcgacggacgcacgcggcctgcaccatctggtatatgagatcgtcgacaattccgtcgatgaagttcttgccggctacggagatcatattatcgtaacgatacataaggacaacagcatctccgtacaggacagaggacgcggaatgccgaccgggatgcataagctcggaaagccgacgccggaagttattttcaccgtgctgcatgccggggggaaattcggacagggcggctataaaacaagcggcggtctgcatggtgtcggtgcatctgtcgtaaacgcattatcggagtggctgacggttactattgagcgtgacggatatgtgtataaacagcggtttgaaaacggcggcaagcccgtgacttcacttgaaaaaatcggaacgaccaaaaaaacaggaacgcttacccattttaaacctgatccgtcaatgttcagcgcaacggtttataattttgacacgctgtcagaacgtctgcgcgaatcggctttcttgttaaaaggtttgaaaatagaattaattgatgaacggaacggcgtaaaagaagtattttattatgagaacggaattgaagcgtttgtcgcttatctaaacgaggaaaaagacgctttatgcgaagtggtttcctttgaaggcgagcatcatgacattgaagtcgatttcgcgtttcagtttaatgacgggtattcagaaaatatgctgtcattcgttaataacgtcagaacaaaggacggcggcacccacgaatcaggagccaaaacggcaatgacaagagcgtttaacgagtatgcgcgaaaggtcgcccttttaaaagagaaagacaagaaccttgaaggcgccgatatcagggaaggtttgtccgcaatcatttccgtgcgtatcccggaggaactgctgcaatttgaaggccagacgaaagggaagcttggcacaagtgaggcgagatccgccgcggatgccgtcatttccgagaatcttgcttatttcctggaagaaaaccgcgatacagcaaccctgcttgtcaaaaaagcgattaaagcaagccaggcccgtgaagcggcccgtaaagcgagagaagaagcgagaagcggcaaaaagcgcaaaaaatcagaagcgacgctgagcggaaaactcacaccggccggttccagaaatccggcgaagaatgaattgtatctggtggagggagactctgcgggaggttctgcaaaacagggaagagaccggaaattccaagccgtgctgccccttcgcggaaaggtcatcaacacagagaaagcaaagcttgcagacatcttcaaaaatgaagaaatcaatacgattattcatgcgatcggaggcggtgtcggcgcagattttgagatagacgacatcaattatgacaagatcatcatcatgacggacgcggataccgacggcgcgcacattcaagtcttgctgttaacatttttctaccgctatatgaaacctttaatcgagcacggaaaagtcttcatcgcccttccgcctctttacaaagtgagcaaaggaagcggtaagaaagagattattgaatatgcttggtccgacgaagaaatggacggcgttttaaagaaagtcggcaaagggtataccatccagcgctataaaggtctgggagaaatgaacgcagaccagctctgggaaacgacgatgaatcccgaatcgcgaacgctcgtcagagtcaagatcgacgatgcggcacgggtagaacgccgtgtaacgacattaatgggagacaaagtagaaccgagaagaaaatggattgaaaaaaatgttgccttcggattagatgaggaaagcaatattttagaaaatgaaaacttgtcggtcgctgaggaggtttaatagtggcacagccagaattatttcatgatttaccgttagaagaagtaatcggcgaccgtttcggacgctacagtaaatacattattcaagacagggcgctgcccgacgctcgtgacggtttaaagccggtgcagcggagaattttatacgccatgcacgcagacggaaatacattcgataaaaatttccgtaaagcggcaaaaacggtcggaaacgttatcggtaattatcatccgcacggtgacagctctgtttatgaagcgatggtgcggatgagccaggattggaaagtgcggaatgtgctgattgagatgcacggcaacaatggaagcattgacggtgatccgccggctgccatgcgttatacggaagcgagattatcttctatcgcgtccgagcttttgcgtgatatagataaaaatacggttgaattcgttccgaactttgatgacactagtaaagaaccggttgttttgcccgccatgtttcctaacttgcttgtcaacggatcaaccgggatttcagcgggctatgcgactgatattccccctcatcatctgggtgaggtcattgatgccgtcattaaacggattgaatctccggattgcaccgtcgatgacttgatgcaggtgattaaagggcctgactttccgacaggaggcattattcaaggagtcgacggcattcggaaggcttatgaaaccggaaaaggcaaaattattatccgcggcaaggctgaagtggaatccgtaagaggcggacgggagcagatcgtcattacagaaattccgtttgaagtaaacaaagccaatctcgtaaagaaaatggacgaataccgcatagacaaaaaagtcgaaggcatttctgaagtccgggatgaaactgaccgcacggggcttcgggtggtcgttgagttaaagaaagaagccgatgcaaaaggcattttgaatttcttatataaaaacactgatctgcagacaacatataactttaatatggtcgccatacataaccgccggccgatgctgatgagtcttacggccatcctggatgcgtatatttcccatcagaaggaagtggtgacaaaccgctccgtctttgaattgcaaaaagcaaaagagcggcaccacatcgttgaaggactgatgaaggcactgtctgtgttagatgaggtcatagccgtcatccgggcaagcagcgacaagaaagatgcgaaacaaaacgtaatgtctaaattcgcatttacggagcctcaggccgaagcgatcgtatccttgcagctgtatcgtctgacaaacacggatattacggcgctaaaagaggaagcggaagagctcagcaagaaaattcaggagctcgaagccattttaagtcatgataaaaagctgttaaaagtcattacaagcagcctgaaaaaattgaaaaagacctatgctgacagcagacggtctgtcattgaagaaaagattgaggaaattaaaatcaatcttgaagtcatggttgcctctgaggacgtatatgtgacagtcacaaaagacggctatgtaaaacgaacaagccagcggtcatttgccgcttctaacggccaggatttcggtatgaaggatactgacaggctgattcaccaatttgaaatgaatacaacggatgttctcctgctctttaccaataagggaagctatgtttattgtccggttcaccagcttcccgatatcaggtggaaagacatggggcagcacgtaacgaacatcatcacgattgaccgagatgaaaccatcgtgaaagctataccggtaaaagaatttgatccatcttcatatttattgtttatgacgaaaaacggcatggtgaaaagaactgaaatgacgcattacaaagcgcagcgttactcgaaagcgcttgttgcccttaaccttaaaggggacgacgagctgattgatgttcatgtcacagacggcggcagccagctgtttatcgccacccgcctcgggtacggtttatggttcggtgaagatgaagtaaatgtagtcggtgcccgtgcggccggcgtaaagggcataaatgtaaaagacggtgataccgtcgtatcaggacaaattctgcatgagacagattcgcttgtccttgtcacacagcggggagcaatcaagcggatgaacctatctgaattcgaaaaaacatccagggcgaagcgcggtgtcatcatgctgcgtgagcttaaaaagaacccgcatcgcgcagtcggcgtattcgcgtgcgctttagccgacatgatcgctgcggaaacagaaaaaggcgagagaatcgaaatcgccgtgaagtccttgcgggcgaatgaccgatacagcaacggctccttctttaccgatgaagatgagacagggccggtaacagatgtatggcgtatccccgcgtctgatgtttaagagtaaaaataaaataaaaaaacctccgctcattgagcggaggttttactatttagctttcatggctgccgaataagtcagtgatagcgtgaacgacttcgattccctgccatacaaataaattcaatgcagtgaatgaaaacaaccctaaaatcaccattcgtaagataaacaacatgtttaacaacctcctcattttatgttacatagataggcgatgttgaacatgaagctcatcgaaatacgaggactgataaaatttagcgattaaaaagcttttctttcgctgtcttctccgggaagcggggcgtctcctgtctgatatcacgatcagtgagacagaagcggcaaaaagcgccgtcaagatatatgagcccgtcagcgattttttctcatcatcagcattttggccggccttcatttcgtgcatttcctgctggtcggctaccgctttaaaatgatgagcagtatcgaacgcatggggaatggagagcaaatgaaagcttgcaatcgctaaaaataaaatagaagcttttaaaaacaagatttttttcaaatgttctccccccttcataagtctgaatatttttattataataccctaatttaaatgtaaagtaaacatatttattaaatttaaaaaattattatcctggttaagtatataccattccatccatcttttcatctcttttttcttaaagacctatttgttatgatatgcacgcattccttatggcatgacaacatttttcgggctgtaagataaaaaacggggcatgacagcaaaagacgtgatgtagaaaccgaaacattttcttaaaaaaacttctcaaccactgttgttgtgatataataatactcgttgtgttaaaagatctaacatatgcagcaaaaatgacagtaaaagatatgtaaaagggaggttaaacatggaggctttcatcagtgaaatcataaatgttccaaatgattttatttggaagtatcttgtttatattttagtcgggatcggattgtactttacgttccgttttcgctttattcaattccaatactttattgaaatgtttagaatcgtcggggagaagccgcaaggaaataaaggagtgtcttcaatgcaggcattctttatctcagccgcttctcgtgtcggaaccggaaacttgaccggcgtcgcgctggcgattgcaacaggcggtccaggcgcagtattttggatgtggatcgtagcgattgtcggtatggcttccagctttgtggaaagcaccttggcgcagctgtataaagtgcgttccggtgacgaattccgcggcggtccggcatattacatggcaaagggactgggcgcccgctggctcggtattttattcgccgtattgattaccgtttctttcggacttatctttaacgccgtgcagtcaaatacgatttctgtggcgtttgacgaagcattccatgtgaataaaacagttatcgcaatcattttagctgtattaacggctttcattatattcggcgggctgaaacgtgttgtatccgtttcgcaatttatcgttccggtcatggcgggtatgtatattctgatcgcgttgtatgttgtaattgtgaatattaccgcggtacctgaattgcttatgacgattgtgaaaaatgcgtttggtcttgagcagatcgtcggcggaagcttaggaagcatcattattatcggtgcgcagcgcggcctgttttcaaacgaagcgggtatgggaagcgcgccgaatgccgcagcggctgcacatgtgtcgcatccggctaagcagggattaattcagacgctcggcgtgttttttgatacatttatcgtttgtacatcgactgcctttatcattttattgtacagctttacgcctaaaggcgacggcatccaagtgacgcaagccgcattgcagcaccacctcggcggctgggccccgacatttattgcgattgcgatgtttttattcgcattcagctctgtcgtcggcaactattactatggtgaaaccaatattgaatttattaaaacaagcaaaacatggcttaatatttaccgcgtattcgtcgtagtgatggtggtatacggatgtttggctgacttccagatcgtctgggacatggcaaacttgtttatgggactcttggctctcattaacttagtggcaatcttactgctgagtaatgtagcctacaagatctataaggattatgccgctcagcgcaaaaaaggtcttgatcctgtattcaaagccgagaataccccggagctcaagcatattgaaacatgggcggaagaagaaggtacaagccccgaacgtaagactgctaactgaggaaacatgcatacaattttcaaaaaaccccttacattttgttgtgaggggtttttttatgtgaaaaaccgggttatttttactgaaaacagatttttttgaatttattgtatttttctcttgcgtgtgtaagggttttcatataaagttttactaaaccggtttaccaaaccgatttagtcttaaaagaaaggagtattgatgtggcttctgattatggtatttttacgatcggtgatgcgatgatcaccttaaatcccgcaagcacaggacctttgcgttttgttacccattttgaacgaaaagcaggaggagctgaactgaattttgcgattgcatgcgccagattgaatctgcactcaaagtgggtcagcagactggggaaggatgagttcggcagagtgatttatcagtttgccaaaggagaaggaattgatgtgactgacgtctcctatgttgaaggctttcctacatctttaaatgtcaaagagatcagaaatgacggttcaggcaagacgttttattatcgtttcaattcaccaattctgactcttgcaccggaagatataacagagaatatgtttgccggcattcacatcgttcatcttaccggtgtgttcctcgcgcttgataagaaaaatcttgaaattgctgaaagggtgctttccatcgccaaagcaagagggattcccgtatcttttgatccgaatatcaggctgaagctgtggacgattgaggaggcgcgtgcggcatttcatcaaatctttccgcatactgatattcttctggcgggccgggacgaaatgaaacagctgacaggtataggggaaaatgaagcattagcccggtttgcagagacctattcaatcagccagctcgtcataaaagacggtgaagcaggttctgcgctgtatcatgatcataagtgggttcacaaagaggctttcccggttgcgcctgttgacacggtaggagcgggtgacggctttaatgccggctacctgtacagttatctgcatggttttgaaccggaaaaacgtctggagtttgccaatgcggtcggtgcgctcgtcaccacagtttccggtgataatgaagggcttccctatctagaagaggttctgtcatttgtaaacaaagagactgtgattgaacggtagcaagcacaacttaaaaagcgggtgagaaaatgaaagcggttcaagtacggaaagcatttgatctgatggtgacggaatgtgagaaaccgtctgttgtccacgcggatgatgttcttgtcaaggtgaagcgggtcggaatttgcggatcagatttgcatatttatcatgggacaaatccgttagcgtccctgccgagagtaatcggacatgaagtcacaggggaagtcgcaaagaccggttctcatgtccggcgtttcaagccgggtgaccgcgtagtggttgaaccgatatcttattgcggaacatgctatgcctgccggaaaggacgtccgaacgtctgcaaagcgctttcggtgttcggcgttcatgaagatggcgggatgcgggaatatatcgtggttccggaaaagcagctgcatgccgtttcccgcgatctgccctgggaggaagcggtcatggcagaaccatatacgatcggcgcccaggccgtttggagaggccgtgtcgagaaggaagataccgttttgattcagggagcgggaccgatcggaatctgcatattaaaaatggcaaagttcaaaggcgcttccgtcatgataaccgacttgaatgatgaacgcttggcattcgctgaaaaaaacggtgcggacgttaccgtcaacgcgcaaaaagaagatcccgttttgcgggtgaacgaatggacaaaaaaagaaggcgccaatgtcgtcattgatgccgtctgtctcccctcaacgtttgaaacgtccattgacgcggtgtctccggccggtcatgtggttgtgcttggttttgatgagaggactgccggcatttctcagcttccgatcacaaaaaaggaagtcacgataaccggttcaagattgcagacgaatcagtttccgtacattacagacttactgaataaaggcctgttaacgcacggcggtcttattacacatacattttcagcagatgacgtccatcaagcatttcagttgatcgaacagcacccgggcaaggtgggaaaagcaatcattacgtttgattaaaggaggagcgagaatgctgcctaagtacgccatttacgaaaaacttctgcatgcacaagtggtggctgtcataaggggacaaaacagccaagaggcgcttgaagtttcaaaagcggccatttcaggaggtatcagcgccattgagcttacatacacaactcctgaagtggaagatgtctttaaggaactccggcatcaagatattcttcttggagccggttctgtaatggatacagaaacggcgagacacgccattttatcaggcgcctcatttatcgtcagctctcattttgtaaaagagatagcgtctctatgcaaccagtacagcgtaccgtatcttccgggatgcatgagcgtgtctgatatggctttggcgcttgaagccggatgtgatgtggtaaagctgtttcccgctaattcgtttgacccttcatttatcaagtcggtcaacggtcctctgccgaatgtccgcattatgccgaccgggggtatctcattaaacagcatgaatgactggctctctgccggagcggtcgcggtcggtgtgggaagcgacttgacaaaagcttatcaaaagggcggctatgaagctgctgtatccctcagcaaagaatacgtctgccgaaaaaacgaatatacgggggtgtaacatgaatatcacgtttcgctggtacggccaaggtaatgatacggtgactcttgaacatgtcagacaaattcccggggtcaaaggcatcgtctgggctcttcaccagaagcccgcgggcgatgtatgggaaaaggaggacattgaagcggaagtcagatacattcaatcctatgggtttcatgcagaggtcgtggaaagcgtgaatgttcatgaagccattaaactcggtcatgaagaacgcggacaatatattgagcactataaacagaccattcgcaatctgtccgaattcggcgtgaaagtcatctgttacaatttcatgccgatatttgactggacgcgtaccgatatgttccgcgcgctggaggatgggtcaaccgctttgttttttgaaaaagcgaaagtggaaagtctccctccggaggaactcatccgcacggttgaagaatcttctgatttgacgcttcccgggtgggagccggagaaaatggcccggatcaaggaactgtttgaggcctatcaaacggttgatgaaaaacagctttgggccaatctagaattctttttacatgaaatccttcctgtagcggaggaacacggcattcaaatggccattcatccggatgatccgccctggtcaatttttggcctgccccgtattatcaccggtgagaaaagttatgaaaagctgcaagagatttcagattcacccgccaactgtattacgttgtgcacgggttcgatgggagcggatcccgccaatgatatggtgaagatcaccaaacactatgcgggagctgcgccgtttgcccatatacgaaatgtgaaaatctgcgataacggtgattttacggaaacttcgcatcttaccagtgatgggtccattgatattaccggtgtggtaaaagaattgcacggccaagactataaaggatatgtacggcctgatcacggccgtcatatctggggcgaacaatgccggccgggttatggtttatatgatcgtgctttaggaattatgtacttgaacgggctgtgggatgcgttctcgtctcatgagaaaggggtgaagagatgagaccgattcatgaacgtttatcaggaagaaccgctgtcataacaggcgggagcggtgttctctgttcagcaatggcaaaggagctttcacggcaggggatgaaaattgcgatcgtcagccggaatgctgataaagcagagcgtgcggcgggcgagattgctgacgctggaggaaccgcggtttctgtaccggctgatgtttcagcccgtgattcgctcgaaaaggcaaaagacgagattatcagccggtttggttctgtcaatcttttaattaacggagccgggggaaaccaccctgatgcgatcactgccagtgagacgtatgaagaggatgagcagggcacatcattttttgatatggacgaaacggggttttccagcgtattttcaaccaactttaccggtgcatttctggcatcgcaagtgtttggaaaagacctactgaaggcggaatgtcccgcgattattaatatttcttctatgagtgcgtatacaccgatgacaaaggtgcccgcctacagcgcggccaaggcggcgattcagaattttacgatgtggatggctgttcatttcgcaaaaaaagggctgcgggtgaatgccatcgctccgggtttctttttgacagcgcaaaaccgtgagttgttattacaggaagatgaaagtctgacagaccgatccaataagattatggcacatacaccgatgaaacgtttcgggaaaccggaagaccttctgggaacgctcctgtggctttcggatgattcatgctcaggcttcgtcaccggggtcaccgttcccgtcgacggaggttttatggcttattccggagtgtgacagaatccatgtccctgtcagattgtaaaccatttacttctgacttatactagtgaaaaatgaagacagacggggatgagtccatgaaaaccattacaatttctgatgtggcgaaatttgcaaacgtatctaaaagcactgtatctcaatttttaaatcagcgctatgactatatgagcgagaaaacgaaacaaaaaatagaagcggccattcaagagctgaactatcagccgaatttcgtcgcccgcagcttaaaacagaaatcaacatttacagtaggtgtggtggtggctaatattcttcacactttttccactcaggtcatcagggcggtggaagactattttcatgaacaaggatttcatattattgtctgcaatgcggatgatgaaccggaaaaagaaaagaaatatattgaaatgctgcgggctaagcaggtggacggaattattatttttccgacgggcgaaaatctctctttatatgaaaagatgaaacgcgatacgtttccggtcgtgtttatggacagaaccattgaagaactcgggattccgacagtgatgcttgataaccatcatgcagccggtcttgccgttgaccggtttatcgaaagcggcattaagagaattgcgattattacgacgtccattattcgggaaatcagtccgagggtagaaaggattgaagggtataaaaaggcgcttgaccgccacggaatgatggtgcgggacgaatatatcaaaacagccgatgcggctgatatttccaatgttttgtcagagctgttctcacttgaggagcctccgaaagcgatattggcggcaaacgatatcgttcttgttgaggtgctgaagtatatgaaggagcatgatatgacaattccggataaggcagccgtcatcggaattgatgaagttccttttgcgggtttttttactcctccgattacgacgatcgtccagcctgcggcagaaatggcgcgaaaagcgggaagccttcttcttcgccagatacaagaaaaagatggcggtgaaaaacggattcaccgctataaaccggcgctgctcgcaaggcaatccggataaccggtttcattgcataaaccggtttactccggcaatttaaatgtctgaatattatgaaatgagagggggattttatgttctcaaaagatagattccctattattcttcttttattttcagccggggtgattaactatttagaccgctcagcgctgtctattgcagcgccgttcatacagcaggatctcacattgtctgcaacccaaatggggctgattttcagcagtttttctgtcggatacgctgtgtttaactttctcggcggtgttgcatctgaccggtatggggctaaattgacattgtgtacggcgatgatcgtttggtctcttttcagcggagcggttgcgcttgctttcggatttgtaagtcttttgattatccgtgttttattcggtatgggagaggggccgctgtcggctgccataagcaaaatggtcaacaattggtttcctccgtctcagcgcgccacggtcattggtctgacaaacagcggcacgccgctcggcggggcgatctccggcccgattgtcgggatgattgctgtggcgttcagctggaaagtttcctttgtcctgatcatgatcatcggtttagtctgggcggtcatctggtttaaatttgtcaaagaatggccggcgccgacggaagacgccccggcaatgaaagcggcgattcagtcgcatgagcagcatatcccgatgaccttttatttgaaacaaaaaacggttctcttcacggcttttgcctttttcgcctacaattacatcttatttttcttcttaacatggtttccgagctatctggtgaaagaacgcggtttaagtgttgaatttatgagcgtggtgactgttattccctggattcttggatttatcggtttggcggcaggcggaatgatttctgattatgtattcaaaaaaaccgccggaaaaggggttttgttctcacggaaagtcattcttgtcacttgtctgttcgcttccgctgtactgatcggatttgccggacttgttaccactaccgtaagtgccgttattctcgttgctttatcagtcttctttttatatataacgggctctatctattgggcggtgattcatgatgtggttgatcaaaggaatgtcggatcagtcggcggctttatgcattttcttgcaaacacggccggtattatcgggcctgctttaaccggctttatcgcggacaaaagcggatcattctccggggcgtttttgcttgcaggcggattagccgttttggcctcggctgcggtaatccgtttcgtgcgcccgattatcattcaaaccgcttctgaagataaaaaagacacgataccttattcataagttatcaaagccactgaggctgtcctgcagataacgggatggcctttttgttctgccgcttgatctgttcctatgataatataggaattgtttacaaaagaagggaagaggagggggcatgaaacagaagccgatatatgtcgaaatcaatattgcatctgatatagaaacgctttgggaatatacgcaaaacccgcatcttcataaggaatgggatctgcggttttctgacattacatatcttcataggctgccagatgaaccgcagagatttctatatgaaacacgaatcggttttgggctgaaggtatccggcacgggcgaatcaataggtgacataaggcctcgctcgtcagaaagagtgtcttcgctcgcttttgcctctgatcatccgctgtcacttataaaagaaggcaggggctactggaagtatatagagcgggataacggacaaaccgcatttttgactcaatatcaatatgaaacggcccgcggtctgccgggaagttggatagaccgttttttatttcgtcctctgctaagctgggctaccgcatggagctttgatgtgttgcggctttggatagaacaaaacagacatccgaagatatcagtccgtttcggatttgtctatgtctgtatgtgtctcgtattcagtctgtattggttttttcaaggctttcatgatggctgtgccgatgcagagatcgtgaggggagcgctggagacagggttaggggtattatggctgcttcccatgcggagaaagtggctgattcacaccgggcagtcagtcttcttttgtgtaacggcactgctatattccggcggcggattcgtgatctcattaggggtgcttacgatagccgcaatgattcttaagcccaagctgccgagcgcctggcatacaaaacgaaagagagaagtgaaatgacggattcaatgtatgaaaaagcgattactcattatcaatcactgcacccgatgctgcagaaacggtacagatttgacggatcacgcacgttttgcggagaaggaattatgtcagaaataaagggaggttcttttcttgtcagaatgcttttaaagacaggtgtttttttcagatgttttttctcagagaggggaaacgatatccctttcactatcgaaaacaaaaacaggcaaaatggcgtggaatggaatcgtacctttttctttaaaagcaaaacgcgtttttttgatgccgtcatggaatatgatgagcgggaaaacagaattcttgattacttcggcaaaccccgcatcctactgtctgaactgcatttagaagcgtcttcagacggagggcttgttattacatccggaaggcagtggctcctgatagtcggaaagaaaatcccgcttccggcatggctgtgcggcagttcaaccgtttatgaggcttatgatgaggaaatgaattgcttcagcataaaggttcatgtgaaaaaccggatactcggcacgcttttctcttaccgggggactttccgtgaaacagagggggaaacatgctgaagcgttatctcatggtaagcgtgatttgctttttgggatttgcggcggctgaagctccgcatatatcagctgctgagacgtttgttttattttccgtactttttttcgttcccgctgtattcgattttgcttttcggccgtcaaagaccttagagaatgtgttattacggagttatcctgttgccgctttatgtgcggtgcttgcgcttgtcacagacttcagtttttttgcctttgtgtggctcatttatacgcttgggctggcactgtatgctgtccggcggctgatgaaaacaaatattcacagaacagaagagatgtctgttatggcgggtttcatttatttggccgggggcggattctggttcttcgcatatgtccttgagattcccgtcatgaatttcggcccgcttatcgttctgctgacggcggtgcactttcactattccgctttcctgattccgatctttaacggattgctcggcaggatcatacgggagaaacgggttctttacagatggagcacggtcattattttgatttcgccgatccttattgccttggggattacattttcaaagacacttgatgtgattgctgtcgctctgtatctggcgggtctgtatgtaaatgcatatctcgtctttacggcgccgtttgttacgaaaacaggcaggatcttgatcaggagttcttcggctgtgttaatgattacaattgctttttctttgatatattcgtacggtgtctaccgcgaggaggcaacgctcacgatcagccagatgatttggattcacggggccgtcaatgcattcggcgttatcctgccggctttggcggggtggaggttggaaaatccgagatcgtttgatgagggcagcgaaagaacgttcagccgtatttacgggaagagaacgataggcaaagactttttgactgatattcatgcagcaaatgacatccattataccggccttctggatcagatgagagaactgcattctgaagacttttcaactcaaaaactggcgccggccgttaattccttttatgaagagacaattgattatgatatcatggcaaaagtgacgtggagcggatggtttcgtccgttcgcgcgcgtgtacgagccgttcagcagaagagcggggcagattcacctgtccatgaatccggattggtatatcatgcacagtgatattataggagttgactctgacaaagacggcagaaaaaatgtccgtgcgtggatcagaacaaatgaaaagcaggaaaccgtttttactgcgctgtattcagcgtacagggcaaaaggggaaggatacatgaatatctctcttccgctgccgtacggccaaatgacgggcattttaaagccttatgcgcgtaagcagaatcttgttttgacaagcagacggcgaaaaagcggagcgggtgatgaagggatttatctgcagacgaaatgggggacgtgtcatcttccgctggcagagacatttcttatttcagcccagagcgaaacaagcctgaaggccgttcatcatatgtggctgttcggactgaaatttttaactgtgcattatcggatcactcatgcttccgcaggtaaccgaagcaaataacaagctgcagcgccgtctgttcatcaggcggctttttctcatctgctttatttgcgagctattttgcggcggatgacacgaaaggagtcatgcgctggatctcatttattctcgtgttagctcagctgtcagggatgagcatgagcggttatgttgtcagtgaatggggatggcacgcggcattttggatcgggagcggcctcggtctttgcctgtctttcatgattcgcgaaatgaaaatgacagcaatgtttggcttcacaatggcgagaaagaaatcagcttgttgtcttttcgtttatgactaagcacgcactggctctgctagtgataggaacattagttcgcaggtgcggaaacgggtaacattaaagctgttttacttactcgcatccgtttttatttttatcattccttttaccgtcagcccgatggcgctttatctggtccaggttttaataggtttttcactcgggcattatttttcctttgctgcttggaatgtcgattgagtctgttccggaagacatgagagcaacatcgatgggggtgtaccaggcgctttgtgcactcggtattttcggagaacctttagccgagggattttttaatgattggctggggctcagagccggattttatttcgcgggggtgctcgggctggcagctgtcatacttgctcatatgtggggagccgatgcaaaaactcgtcggaaaaaagcagggaagatgcggcaaagtattatcagacatgattttattttttgtgtacgctttcaaaaaagaagagatcttattcggataaaatccattccaatatatgtatttttagtgaaagtaagtatttgatctacaaaatatgacaaattccctttgttcaagatggtaaaatcagattgcctgctaagtgagtaagcagcaggcaacaaatcaaaagggggcaatattaatgttaaaaagtaaaattaaaaaaatagccggtgcggctgtaattgctggagcattattggtttccgtgtcgccagcaaaagcagaaactcttccgggattgatctgggtcatggacaaatatactgacgcttttaaattcgacatgtttattaaaaacggaaatgaaaaatgggtttatgtttacacaagattatccgatggcaaagttgatgtggaagaagtaaagtgtgaaacaatttataaagatcgatgctatgtaaagcagtaagaaataaatacaaatcgtaaaacatcctattttttaattctgtctcatcaactaagtatacttaagataacgagacaggattttcgttgaagattttacttcctagaatatatattatgtaaactaggaatgatgtagagaatataaaagtggatccatattctaagagcatccccttttgtaaggaaaacctctacggccttaataaattaaattggtcataaaggtttttcagtttgagtattttaatcggttatgtcacttgttgctggtcttcttgatcaagtccacgccatcgtatgccagactttccacacttgcagccttctgcagtatgtaatgatcaaaaaagttcttcgtatagtctgtaacaagatttcgcatctccatggcatcccgttcacctctaagttccttattcacactggtaaacacgatgtcgcagtaatctaaatgcgcagcacgatcaacagagaaataataggtatccatgctattgttagcgccaatgatcgcattcatgttatagttcggttcagaaaacagcagcaaaaagggtttcttaaggtcgctgccctgaaggccgaacgcaccgctatccaagccaatcccgcaggcgaaccgttcgtcgtcccggcaaacaatcgccgtcgtaggccctccataagaatgtccgactatgcccatgccgatatcaagcaacaatctgcccttaaagatggaattcagctctccagaatccaatttgacaagataatcggctacataccttacatcttctgcctgtaattcactatactctgttaacttgtcaagtatcggcagtgtaagcacgttttggcacatctcaatggcagtttcatcgtcgggctgcatttccatcttaccagccaacgccagcatctccggatcttcagaaaacgccataatgacatccgaaaaatcctttgatacattaaacattcgcccatctttacgcttatacatcgtgctattttgatggccgatgcttactacaacatatcccatgcttgccaagtctgtacagatcactgtaccccattctggagaaccgcccccgccgcaaacataaaataacaccggatagcgtttttccttcccggagagagcaaggtcgtcgtaacattgggtcttgatatctatagagtaagcatctttcaacgcagagagaagcgtctgctcatcaagcatttcgcagacttcaggaaacatgtacgttgatgtagtcttcccttcgctgctgtcggacggataatacacaaacgccgtcagttctctttttgtatgatctgatgccgtgtactcaaaatccatctgggttcggccgacagtatagccgccaattggctccggaaacgcgtcatactttttcattctcttgttcccccttacgtaataaaagtgacggatgtgaaatacacacattgctctacaaacgcttttcattacatcatatgttcagtgaatcatagctactccttggctttcttgagattgctaacaacccttgtactggcccatatactgtttcagagtttcatccgccacgtaaacctccttgtattgctgtttaagatgacaaaagcggacatcgttgctgatgtccgcctaaagctaactaattgggttctgttccccaaatcagttttccttgatgatataatgtgatttttttcgttgttttaaacgtatttgattggaaaaaggaataatcgccgctttgtgcataattgctccagtcatcattgtgaagacgaagctgaatattccctgtgcttgctcccggtgacagcgttcctgttttaaaccccagttccagataggtatctgcaccttgcttaggtttatgcagcgtcacaaatttgtgggtcagattgccgcatcccatctgcgcgtagtcacagtcaaagttttggcctttgtttttcacgttataccagtaacgggcagtgacatcttttaaatcaaccgtcgcattgccgttattttttatgtgaagctgcgggcggatttgattgctgttcacaagcccatcccctgctttgtattgtacagaaacgcctttttcctgtgtggggttatcttgtgctggcgtttcagggccgtccttcgttgaatctttagtgccgcgaatgttttctcttacgaatgttcctgaagcagttaaatctgacagcggccagccgcctgttttagatgctcccggctttaacgctgaggatgattcctgcttatcagaaagattccagttcacccagctgattttcttgctgtcgagataattcagccattcccgcgactggtcaaggaatataccgccatttccagacgcgtcgcttgttccccattccgtcacgaaaataggcgctcctttgctgagtgcgtagtttgctttatcccgtaaaaattggccatgtgtgccggcataaaaatgaagcgcgtacatgacgtttgcatcttttaactggtcatcggcagcatcattcacatcctggctccatgtaccggttccgacaatgatgatgttgtctggatcatttttgcggataacggaaatcacttcttccgcatacggtttaatatcacgcttccagttcacgtcaccgtttggttcgtttgcaatttcataaatgacgtttggcgtgtttccgtaaagacttgacatctccttgaaaaattcttttgccttctctttattttggtttgggttgccgtcatttaaaatatgccagtcaatgatgacatatatcccaagttcttttgccgcttcaaccgcttcttttactttatttttcacggacgggttgtcaatataaccgccatctgccgtatacatcgccgcgcggaaaacggttatgccccaatcgtctctcagccattttaagctgtctttattgacgaaatcgccataccattgcaatccatgtgaactgatccctttcagttgtaccgctttgccatctcggtttacaagttgtgtaccttttatgctaagctgaccattcttggctactggcgtttttgtccctgctgctgatgccggcgaaggcagcaagccgcccattgtcaataccgcaatcaataaacacgtaataaaaacagaaattgaccgtttcatatctgatcttttcctccttcgcatcattttggctctttcttatgagctcgaactcattgtaaaaatctttctcatgattgtctatcaacctaatttcttgtttttgggaggtgtaaaagcctgtcaatttgctctatctctattgaataagacacacctgacacatatagaacaaagaaaaccgggctgaatcgggactttacacgtcatttttcaatcgaatcgaaaaattaaatgtatttccaacgtagacacgctgaatgtgatgagtctcaatatggcattgaatcttatgattgctgtaagaagacgagtccttgttaatttaaggttgatgtaaggttcggattaatacgggttaaggttggagttgtacaataagattgtacttcagtgagggattcagccagaagaattcccccttcaataaatcatagaggtgaaaaggtttgagagaaaataaaattttgtcttcattatgttacttcagtatattttttgcgccgtttctgtttccgattatcgtctatttcttaggccaggatgatgtgaaatatcatgcgaaaaaatctttgtggacgcatctgattccttatttgatttttggaattggcatcatcgcttcaggtttacttggtatgaatgacatcaggcacaccgggcctttcctgcttgcgacgtatgctgttacattccttgtggcgatctattttttcatttggaacattgtcaaaggaatcaaagtgttttcggaacaataggaaaaaacggttctgttattaatcaacagaaccgtttttttgtatagccattatcataattgtatatctatcgttgtcccttctcccgcggtgctgtgaatggtgatgtcccctccgtgcttttggataatatcctttgctatggccattccaagaccagagcctgcatgcgtcgttcctgtatttgtccccctgtaatagcgatcaaacactttctccagctcctcttcttctatccctttgccgttgtccttaattgtcacatgagttcgttctttttgttcaagccgtacaacgatcttcacatcaggatcattgtgaacgagggcatttaaaatgagattcgtgaccgctctccgaatcaatatcgcatcaaggttcagcatcagcttttccaggttcgtttgaagttcaatggatttatccgcatatctagaatcgtttaacatatcaattaacgtttcccgcagcagcgatacaaggtttacccgctctgtatgtaacatcacatcgttgtttttcagccttgtcgttaaatttaaatcttccatcacatctttcatatagagggatttactctcaatgatctgggcgtactctctgatctgttcgactgtgagatggtaatttggatctttgatgatttctgcatagccttgaatagatgctaatggtgttttaatgtcatgagaaatatgactgatccactcttcacgcatttgctctaatttatctttttcttttttgcttaaagatagttgttccgataagtgattgacattatagaagacatctttataaatgcctttggatttcatgttgatcgtataatctccattagctaaccgctggattccttgaatgacacggccgagcggttttgtgagctgccggctgaatagatagccaatgagtaacgcgatcaatgcatctattgataataatatgatggttcctgcattgaacttcgtcacaaattccttggtatcatatgagaggataaattttccgagagagggatttttaaaccctataaagtaactgtactccttgccatttacttttttcccgccagcgtaaatggttgataataattgttcatccttatatttatgtaaatttacaatttcaataggcgtatattttttcttcagtcctttaggttctctatcatgataaacatcctgtccgttttcatctaatatttgaatccatgcattctgctcttttaaagctttttggccctctttgtttactgtgataccattgttcgataacgtgacatattgtcggaatgatcttgtgaaagtttccggtgtactttcttcgtcatgttggctgttcgcctggaaaacgagccaaaacataaaaataaataaattaatgaagactgtaatgatggtcacgataatgacagagaccatatatctgcctgttaatcgccaattcatccttacgcatcctttacaacaaatttgtagcctaaccctttcacagtgacgagaaagtctggttttgatggggtgttttctattttctcacggagcctgcgtatatgaaccatcactgtgttgtcagaaccgaagaaatcttctccccatacagcttgatagagtatttctttactgatcacccgattgggatgctgcagaaaataggtcataagcataagttctttaggtgttaactcaatagccgctccatttttggtgagctcggcttgttgttggtttaattcaaatggccctttttttattagggttccggtttgagaaggctgtaagtaagagacccgtctcagctgcgctttgacccggtatgcaacttccttagggctgaagggttttgtaatgtagtcgtccccgccgatggcaagtcctacaattttatccgtttcctccccctttgcagacaaaaagataataggaacgtgtgaaatgtctcttatttgcttgcagatatcatagccttcaccgtctggcagcatgatatccaatatcaccagatcgggattttcttgatgaaattgagccaatccgtcacgggcagtcgaagcggtgatcacacgatcaatgccttctcttattaatacggttttgatcagttccaaaatttctttttcgtcgtctatgattaatactttgctgtgaagccgtgacatataatgatcactccttgaagtcattgtcattattatacccaatgtctgtgtatcgttaaaaaaatcaacacttctatcccacagaaaataagccaattttctttttcaagtaagaaaattggcttattgcgatgctgatgcctttaacgctttacaacaaatgttgtcacgctttgagccggcagatgggcccaaaaatgattgtccgttactttgagatccgttccaggttgaagattgctgctgctgctcgtgatccatctggatacttgcgaagcagttccattctgcaatacgaagttttggttgacccctgtgttatttttattaatggcaacaatcacgaccttattgtctcctttataggctgacacgtaaacattcggttcaggatttttcgttgcatcaatccttacatagccagggcgcacaaattttgagaaatgagccatattgtatccgcgtttgctgatcatcccatcttctttcatagggccgtatgatctgcggatataccaccacacataagcttgaaaatctccctctaccattgaatgatgaatatgctctgaaacacctaaagcctcaggccagcgatccgctgaattgttgtcactattcggatagtatacctccgtcatccatagctctttccctcctcctttttgtttgaaaagaggataaggaaactgactgacctgagtgccgtacaggtgggttccgaggatatccatattcctaagcgcctgcggatcatttaaaatggggtccgatatatttttcaggtattgaaatgattccggcgcaatcacgcgggcattaatggaaccggcattctctctcatgaaacgcaggatttcttggggcgtccaccatgtccattcgtgagcgtaatcaggctcgttttgcatagaaatcgcatacagattcacaccattactcttcatgaaattaacgaaatcgttaagatgctgcgcgtatgcggcgtacttatcgtatctcagccgcttagctgttgtgtcaccattatgattgaaagtctcaaccatatcgtttggcggattccaaggggaagcaaaaacgattgctccatgtttgatcgcactctttgcagtctccacttccttgtaccaattatttctattttcatctacatgaattcttaagaccgaaaaacctaactgattctgtccattgccaaaagcggtctcccgttgagccgcagtcaagtctccaatccaagccgggtggttcattcctccaaaaccgcgaatcacttgtctatctgcagatatattaactgttgcatcacttgctgctgaaacttcagtaactcccggtcctaagagcatgacggacagcattgtgaaacataccaataatacacaaattgttttttttacgctcgatatcattttttcctctccttcatatgtcgtttatggacttagaaaacgtacctttgtctccctttgcttatctttgtgtaaactgccagtaatcgaaattaaacaagtttcctgtaccagttccggtaaatacaaagaatacgttgtgaacaccggatgcgccgcttaccgcagtttctatttctctccaagattgcgttccgcctgtggaagggacattcaaggttccgacaagcttaccgtttgcactatctagccgcacttctattttcccgccaagagcggacgctacatttgctttaaacgtcctggcgccgcctgacccgaaatctgcatttccaacagcaatccagtctccgttatgaatgtttgtgacatgttgattattgaccgggccgccgggtgctgaggatgcctctgtcaaaatccgtccgttccaggcaaacgtttccgcttctacgcggtgatatggattcaaattggatagctgtttgacacctgcaaaatttgccgctacctcttgcagggagccatctggattatgcacaagcttattaatatggggagaacggtaacctttgccggccccgtaaagagcggagctgacagtttgagtatgatacaccacataccactcgtttttaaaattgaaaacagcatgatgattgttcccgccgcctccgaaaaatgctcccggatttttcagaaagtgccctctatacgaaaaagaatctataggacttgagctggtcatatagccgatctcacctggaggtttatcggccgggtgcgcgcccccgaaattgatacaataggaatagtaatattttccgttatacttatgcattcccgaatcttcaaacataaaaggcgcatcaatcgtagacgcacttccggcaacactggtcatatcaggatctaatttcatgactcttgctgttttaggattggcccattgcccctgtgcgggatttgaaccgcccggaacgcctccgccggcatataggtaaccggtaccgtcatcatctacgaatactgccggatcaaaaagccatacaacaccggacattcctggcgtatttggcgttaccagcgcttttccgatcggatctgtccatgggccggtcgggctgtctgcggtgagaaccccgatacctccgccgccgtttgcgaaataaaggaaaaatttatccttaccattgatctttttcaccgcggctgacggggcccatgatgctcctgcccatttggcaatcccccggccgccattcgccccattggcacccgctgcgggaatcgttccgtgatctgtccagttcaccatatccgctgaagatatgacggatattttattcaaattggcaaatgaattatccttaatcgtgccgtcgctattatattcatagtcatcgcttgacatatagatgtagactcttccgttataggtcagcgcaaacggatctgcgcccagatgatggtcaataagcggatttgaattcccaacatgttttgcaattggagtgcttaccgcattcgcatattccccaggtaaacagctcaataataaagcaaggacccataggcatacccaacattttttacacataacttaacgctcctcctttatttaaaaatttaggcaacttttaccatctgagaacaaattgcagtaccggcagtaaaaagcagactccgcagttaagcaactcaataatagagctagtacccctaaacatacgctacacttttttctaataacttgacatcctcctttttccttaaaatgtatgatgatttttttaccatttgatgacaactggtcatggagaacggctctggagtaaaccttgcgaacacaggagtatgactctcgcctttttaataaaaacgccgctgagtgccaggccagcggcgttttatacttgatcatttacattttgtcaaactttgcgtctcccgcaaacgatcccattgacagttgttcttcaagaacaagtccgtgatgatgccgttcttcaatccgtttaataatagatcgaatggcttccgcattttcttcgatattgtgaggttcaaagatcgtcacgtgatctccttttaatttgtactcaagataatgctgtgctgttgattgtgtccagcccctatcatcggttacatcgccgcatagcaaatgatggatgttggcgttaacggcgccggaattgatcacttcattgtggtacgcaagatagcctctgattttatccttaatcgaaggaatggttaatatttctctgtaatagtccggaataatgtccatattcagatggacgatctcttcgatttcctcttccgataaatgagttacagaagtggttattttagaatccagcataatcacatcagatacggtgcggcctcgcttctccaaagctttagcagcctcaaaagccaaattcgatcccgaagagtaaccaagcaaaacaaaaggcccttgttcctgaatgcgtatcatgctttctgcatatcggtcaacgatttctttctcatgagacggctcttctaagaaatcagcagcatagacggtgctgacgccgtcaagtcttttcgccatttcattataaacgagtccatatccgattaaaggcgggaaacagaacacagggattgaatcttcctggttcagcttgacgaatacgttatgatccgtctcggattcgaaaactgccgcttgaatggcgcgtgccattgtttcgatggtaggaaaatcgtatacggcttgataatgcatgttgagtcccataccggcgttaatttgatgaatgagctgcaatactttaagtgaatggccgccaacgtcaaagaagtgatctttaatcccggggtcaggcagagctaaaatatccttccatatatcggccagctgcttttcaattaacgttcctggcgctgtgtattcggttccggtaagcctatttccctcaggagccggcaaagcttttcgatcgatttttccattagcagttatcggcatcttctctacttgtacaaaataagccggaatcatatacgcaggcagtttgttcagcaaatgacgcttcagctgcgccgtatttaatgactcgtctcctgacaagtaagcgcacagctgctttgagccctctttttcaatcgcgatgacgaccgcttctttgacagcatcgagttgtaataaagatgcttcaatctcgccgagttctatccggtagcctcggattttcacttgatgatcaattcgtcccaaatactcgatatttccgtccggcagccatcttgccaagtcgcctgtccggtacatccgcttccctgcttcaaatgggtgagctgcaaacttctcagctgtcagctccggacggttcaaatagccccgagcgagcccgtctccggcgatacacagctctcctgccacaccgagcggctggaaatattccgatccgggctgtacaatgtacaattgaatgttggaaatcggtttacctatcggaacggagttaagcgtttctcccgcttcacattcaaaatacgatacatcgatcgtcgcttcggtcggtccgtataaattaatgatttgagcctcgcccgccggtgtgatcatgcgatgaaacccggcaacgtgcgcaggcgtcaaagcctcgccgcttgcaaatacatattttaatgacgccagctttctctttaattcctcgtcggatttctgctccatggactcaagaaaagcatgcagcatcgcaggcacaaaatgcataatggtgacatttttctgcgcaatcgtatctaaaatgacgtcagggttcttttctcctccgtttgacagcaataccgctttagaaccagtcatcgaccaccagaacaattcccacaccgatacatcaaaggtgattggggttttttgcagaatgacatcctgcttatccagcgggtaatgttcctgcatccaaacgagacggttgattacggatcggtgttccaccataacccctttcggtcggcctgttgatcccgaagtatagataacataagctaagtgattcggtccggccgtctgtttcaagtttgaaccatcttcccaagagaatcgcggatcttccaggtcaagcacttttcccgtaaaaggcacgcttttcctcaagtgactctgtgctaacaacagcttcgtatccgaatcctccaatatatagtgaattcgttctaccggatagctcgggtcgatcggcacatacgcgccgccggcttttaagattccgaagagtcctacgatcatttccaaggaacgttcggccataatcccgactggctgatccggctgcacgccttctgattgcaatgtccgggcaagttgattcgctctttcattcagttcccggtatgtcagctggctttccccgtatacgacagccgtttgatcaggcgtacgctgtgcttgttcctcaaacaattgatgaagcgtcttttcctttggataatctgcttccgtatcattaaatgcctctattaggagcgaacgttcatctcccgtaagtatatccaagtcttggacgcgaatcgcctgactgttcaccatctgcttaatgatttgcataaaatgctcttccatccgcttgacacttgcatgatcatagacgttgctattgtatacaaaatgaatgtcgatttctccagccggcatgacaatgaaattgaaatcgtaatgggtatgctcttccatatggaaattgataatgtccagcgcgtcacgattcggtttcatatgctccatttgtttctcgaccggataattttcaaataccatgatatgactgatcagctgctgcttttgttcggtttgagcctgaatttcatacaacggaaatgtatcatacgcctgagaagccaatgcctgctcctggctcattttcaacacttgttccacagtcattccaggctgagcggtaatacgtacgggaatggtgttgataaataagccgaccatggattcaatacccggaatttctgccgggcgtccggatacaaccgacccgaaaacgacatcctgactgttgttgtatctttgcagcaatagcccccacgcactttgaatgaatgtattcacggtgacgtgatgcttgcttgcagtctgtctgatttcttctgacagctgctttccgagccggcatgcaagcctttgtttttgatatttcttggcttggtttgagacaggttctttcagtaaaacggtttgtccttcataaccgtccaaatatttttgccaataggccaaagcgttctgatgatcctggtcttccagccattcgatatatcggctgtacggggtgacggcttcccgctccggttgtcttctctcaagaagctcataataggtttcaaacacttctttcgtaataagaggcagacaccagccatccattaaaatatgatggaagctccatatcaatcggacttggtcgtcctctgtacgaaggattgatacgcgcattaacgcatcttgggtaaggtcgaatcctcttgccttatctttttgtacaaagccggcaatgaactcgtttcgttgtttattcttcatgcttcgaatatcttcaacagttatttcgatcggttttttttggaatacgatctgtaaaggctgatctttccattccgtataaaaatgagtccggagaatctcgtgtctttccgccagctgcgacaaactcattgtaaatgcctcaatatccaagtcgcctttgaggtcaaaagcggcttgttcaaagtaagctctggaagccgaatcgattaaactatggaacagcatacctttctgcatgggagttaaaggatatatattttcaatgtcgccgatatgctgtgtttgcttaacaaattgatctaattcctcgattgttatgtccttcagcgaaatatcgcttggcgtcaggtgaatgtgttcttgagctgcgcaatgttcgatgacttcttttaggctgttctttaagagagctgcacatgtttccattgtttctcttcgatattgtttaccgctgtaactgatggccaatgacagccgaccgtctgagatcatgccgttaatgtcaagcgtataggcaatggggtgcctgtcgctcgcaattttccctccggagtaaggagatacctcgattcctccattttcgaaatcttgatcaaattgtccgaggtaattgaagctgatttccggatgtccggtccattctgatgccttcggatgatcggacaaatatttcatcaggccatatcctattcctttttggggaatctgacgcagctgttctttcaccgtcctaatccgctgggagatgtcccggtccgcctggatttgaagagaaaccgggtattgggttgtaaaccagcccaccgtacgtgaaatatcaacgtcttgaaaaacagattccctgccgtgtccttccagatgaacatgaatttcttcatgccccgtccagcgatgaacagccattccgagtccggtcagcaataaatcattaatgtcagtcgtataggcacggttcgatttttttaataaacgctcggtttcttcctctgtccattggacgatgatcgtttccaggtcttcggccagaccggtctcctgctcattatcctttggcaatttgtgttgcgagatatgtttctgctcaagccaatattgatttttcgcttcaaattccgggctttctgcataacgtttcaatcgttcagcccataacagataggaatccgtcttcttagggagcgtgatcgcttctccgttttggagctgctcataagctgacgttatatcctcaagtaaaatcctccacgatacgccatctacaaccagatgatgaattgcaatcagcaaatgatcgccatcctgacattgaaacaatcccagtttcatgagcggaccatcggctaaatggatggattgctgaatgtcattggctatcatttctatcgtttcggcaaggttgttttcttcgagtaaagagaatacgtcgaggctgaataattctccttcactgatcccgcaggttctggcttcgtattcatgatctccctgaacatagaccatgcgcaaagcatcgtgatgctcggcaatcttcttcatgactttctgaagcttcgattcgtccaacccctctttaaaataaagcatgacagattgattataatggtgcggatcagggtattgccgggcgaaaaaccaatgctgaatcggcgtcaataaagtacggcctttgatttccccttgttctgcgattcgggtaacgggcttaataaaaggagcaagcccggagatcgtcgggtgtttgaacaagtgtttgatgtcaagcttatacccggcttgatataagcttgaggttacctgaatcgacttaatcgaatctcctcccagctcaaagaaatggtcatcgattccgacctgttctgcgcctaataccgattcccacaccccggccagtattttttccagttctgtccgcggagctgtataaggattgccggtgagatttcccgttggagcaggcagcgcctgacgatctatttttccgttggaagtaagcggcatcgctgccagctgtacaaaataagcagggatcatataggacggaagctgccgggacaggtgctcccgaatttcgcctgcggttaaagaatgctgtgcggtataataggcgcacaaggatgtttccccgttggtttcttgtgccgtaacgagagcttcttgaatcggcggtatttggaaaaatgcggattcgacttccccgatttcaatgcggtaaccgcggattttcacctggtggtcgatccggcctaaatattcgatatttccgtccggcagccgccttgctaagtctcccgtccggtacattttcacctctggtacaaaggggtgctgcaaaaatctttccgccgttaattccgctctgttcaagtatcctctggcgatgccgtccccgctgatatatatttctcccgggacgccggccggcaccggcttcatgctcttatccagcacgaaaatgttcatgttgtccgcggcggttccgatcggcactgattcccgtctgtcgttttgcggatcaaaggaataaatcatacagccgacgactgtctctgtaggcccgtattcgttaaaaatttcgatttttccgccgaatttcccgctgatgctacgggcgagccgcgtgcttaaattgtcaccgccgacaatgaatttccgaatggtgcactcagcagggatatttatctctttcaataactgcaagtgcgccggggtcagcttgataatatccgcccttgaatcctgaataatggaatcaagcaaggcagtactgttttctcctccgtagacaataatggcatttcctgtaatgagcggagtaaaaacagacgttatcgtcagatcaaaagcgatggacgaatataggggaaagttggttttttcccctttgacatagacccggcgggcccaccaaatataattggttaagccctgatgctcaattgccactcctttaggcttgcctgtggagcctgacgtataaatgacataggccaaatccttcgtactgctgatcggttccaggtaagagccgtcttcgtggtaagagctttcctgatcgaggaaaaccattgtgcccgcaagttccaactgtttttgaagatggctctgcgtcaggacgatatcagcttgggagtcttctactatatactgtatgcgatgcttcggataatccggatcaattggcacataggcccctcccgcttttaaaacggccagtattcccacgaccagttcgatctcatgttcgcagataatcgcagtgagccgatccgtctttaccccctttttccttaacgttcgggctaattgattggcacgttcattgagctgacgatatgtgaattgcttttctccgtaaataacggctgcttgatccggtgttcgtttcatctgttcttcgaataactgataaaccgtcttatcccgcggatattcagttttcgcagtttgattgtcaacgagaagtgaatgtgtctccgattctggcaaaatattcacttgaccgagggggagctcaggctgaaataatatgacagaaaatagccggtttaaatgtccgagcacctgcatcatatactgacgatcatagacttgttcattaaaacataactttatgtcaatcaagtcttcacccatagcaaactggaataaagcatctgcagcagccgtttctatgaaaccatcaggatgaatttgctctagcgaaacgactgtatcgatgatcggcaaatgatttgcattgtagttcagcctcagctgtccggccattttatcaaagggaacgtcctgatataagatcgcttcgtccaccgtatgtttcaattcatggaaaattgatttaaacgtactgccggaattgatatgctgtttgattaacatgagctggtctgaacgaagatcttcatcagtttcgtcttcaaagcttggaacccctgtaatcacgccttcttcccccgtgtatttgtataaaagggattcaattccgatcaggagaaccagatagacggccattggcgtttggttcgtcatggtcaggatgcgccgtgatacatccgcactcaatgaactgtgaatacagtcagatccacttgttatatcacgctttactgttgagtcggacatttgaaacgaagggaatgcactaggacggtcttccgtgtgaaacattcggccccagaacaactcctgttgtttgaattctgacactcatatccctccagttggtttcattcctgttttcaggcgactggcggcagccgcggcattcatgccgggacagccactgcccctgtgattagaaatccaattcgattgtgcttgcgagatgtttacttttgtttactttttcgcttaattgaatgtcttttaaaggaatggatgggtttctcataatcgccgaaaggatcatgacgtaatccttggccaatacagcaatggttttctttttaaacagtttcgtacagtaatcaaaactgccctgaatctcatcttggtctattaagaagttcagctgtaaatcaaacttggctgccgtctctgtttgttcataaggcctgactgcgagagagtccacttcaatatctgtttgttcggtattttgcaggacaaacatcgtatcaaacaatggattgcggcttaagtcccgtttcacacccagtttttcaactaattcttcaaaaggatactcttgatgttcaaaagccttcagcatggtttctttcgtttccgttatataatccaaaaatgtcttttccgccatcggagcggtgcggatggctaatgtattgacaaacattccgataatgggttccaaatccgcatgcggtctccctgcaataggtgtaccgacaacgatatcatcctgaccgctgtattttgccagcagtatggaataggccgagaatagaatcatgtaagcggtcgttccggtcaattcttccagctgctttatcccttgggtgacagtcttatcgagcgtaaaattgtgccttttcccatcaaagcttctaaccggcggtctcgcaaaatctttcggcagctcgaatgacgggagctcttcatgaaatacaccaagccaatactcttcctggctcttgattcgttctctttgttctttttgatgtttccattccgtaaagtctttgtactgaatacggagcggagctaactctttgccgtcatacaattgaatcagttcttcgacaaaaatattcatggaggcgccgtccgtgataatgtggtgcatgtcaaacatgaaaatatgcaggtcttgttctaactcgatgagtccggccctgagtaatggagcttggctgagatcgaacggccgcacgaaggtccggaaacattcctcaacctcgtcggctgttgctttgtatctttccatcgaaaactccacttgcgatttgatcatctgcaccggttctccgcggaccatttcaaaaccggtacgcagcgattcatggcgctggatcagtctttggaaagcggtttgcaagcgattcatgtcgagttttccttctaatgtaagaattcccggcatattgtagctcagttctccgccttctatttgtgttgacaggtaaaccatcttctgcacggacgatacgggatagacatcttttgctttggctttcggaatatagtccggtccgttggtttcagcttctgcaatagcttgtgccatttcttcaactgtcggacattgaaagacttctcttaatgaaatgtttttgctgaattgcttatgaattttggcgatgagcgtcatcccccgcaacgagtggccgcccaaatcgaaaaagttatcttttacacctatttcttttaccttcaaaacgtcttgccagatgcatatcagctgctcttccatattcgtccgcggagcaacgtagtcagtccccgtttgcaaacctgcttcaggcatcggtaatgctcttcgatttacttttccattgccggttagcggcagtttctccagctggatgaagtatgaagggatcatatatcccggtatttggccagcaagtttttctttaagctgactgatcgagagtgattgctctgctgtaaaataggcatacaaatcgctttggccatcggtattttcttttgctaggacaactgcttcctgtacgtgcttgagaagagcggcttccacctcaccgagttcaacccgataaccgcggattttgacttgatggtccctccttcccgcatattcaatgtttccctcgggaaggtaacgagccagatcgcctgttttatacatccgttgattcgagtcatatgggtgcggaacaaaagtttcgagcgtcaaagactccctgttatgatagcctctggccaggctcactcctgaaatacaaagttcaccgacgattccgacaggctgaagcgttccggcttcattcaaaatgaaaatctccgtatttgaaatcggttttccgatcggctgaagctcctgatctgtatcaggatcgacggtatacatggtcacaacatgcgtctccgacggaccgtaatgattatgcaatgtgacttggtgtcgtgccagcatgtcacgcagcatccttgttgcgatgagctgttctcccgcagcgatgatgtgatccacgcactcggcaaacggttcgaaatagtgtttctctgaggcaaggagcttaaggaacgctgtcgggagaaatgctgtttgtatcccgtgcgttctgacaaaatcattgagctgccgtatgtcacgttttgcctcattgccgatgataaagagtgttcctccgcttgaaagcgcggagaacatttcttgatagcagacatcaaagctcattgcggcaaattgcagcactctgtcaaagcgaagctgcgtatgatcctgctcataagcgagcagattcgtcatcgtcttgtgctccagctgaacgcctttcggctgccctgttgtgcctgacgtgtaaataacatacattaaatcattttccgagcaggaaagattaagattgtctgttctgccttgatatagtaacggatcatcaagcagaagcacttctccttcaaagagcggcggaatagcgtgacctgcacaagtcaaaagcacatcggcaccgctgtcttttagcataaaagcccgccgtttttcgggaagctccggatcgatagggagaaatgctgcgccggcctttaatatggctaaaatgccgatgatcatatgtgctgagcgatccgtgagaacggcaacaacctgatcagtgcaggcacccttatcttgaagaacgcgcgccagctgattggaacgttcattcagctgacgataagtcagcgtctgatttccaaacatgacggcttcatgatccgggttacgctcagcctgctgctcaaaaagctgatgaatcgttgtcggaattcgtttttccgcaactgcagtatcgttaaagagttgctgaatgtctctttcctcttccttggtcatcatatttaaacgagccagctcggcctcaggctgtttaataatcgaatcaaccagctgttcaaaatgccccatcatccgttcgatcgtttccggtttaaacagagccgtcaagtattccagcgtgaactgaatacccgccccttcttccacagcagttaaagttagatcaaatttcgccatcgtatgtccgtttggatatggtttgaaagtgacgtcatttatctctaactgttcctgctccgtgttttgaagcacaaacatggtgtcaaacaatggattgcggctcaagtctctggcgatattcagttgatcgatcagcgcttcgaacggataatcctgatgttcataagcttttaatgcattctccttcacttcggacagatactgagagaacgtcttccctttttcagggtaatttctcatcgccaatgtattgacaaacattccgataatcggttccaaatcggcgtgcggtcttcccgctataggactgccgacaataatgtcttcctggccgctgtattttgaaagcaataatgtataagacgcaaggagcaccatatataaagtcgattcagtttgggatgccagctgctttaatccgtcgcttttttgcttatcaagcgtaaaatgcattgtggctcccgcaaaatcccgtgccgacggccggatataatcggccggcagatgaaggacaggaacgtcgccgctgtacagctctaaccaataggcttcttgtttttgaatctgctgtaatctcgcttcgccggtctgccataccgcgtagtccttgtactggatgcgcaggggcggtaatgtctctccttcataaatccggataaattctttgatcaatacgctcatggatgttccgtcagaaataatgtggtgcatatcaaacatcagaattccgcggtcaggttgaagttcaatcagccctacgcgaagcagcggcggctcatccaggtgaaaaggacgaataaattggcggatataaaggtccgcatcatcttcttccccttggtaccactctgcttcaaacgccgcgtgatccaagacatactgaacaggttctccgtcagccattttaaaaccggtgcgcaaagattcatggcgcaaaatcagcgtgcggaaggcttgctgcagcttgtcacgatcaagctttccttccacagtcatcagtcccagcatgttgtaactgagttctccgccttccaagtgattcaggatgtacaaccgtttttgtgctgaggataccggataataaggtcttttttcaattgcaggaatcgcggcatacccggtcagctccgtcttcgtgatcgtccgtgcgagctgttcaatggttgggaaacggaagacgtcccgcaaaggaatttggacatgcatttgcttttgtatttttgcaatcagcgccgttgcccgcagggagtgtccgccgatctcaaaaaagtgatctctgatccccaactgctctagtccaaggacatcctcccaaattgctgtcagctggatttctgccgaagtttgcggcgggacgtactctatgccgctgtcacgctttttgaccggagccggcaataactggcgattcaacttcccgtttggcgtcagcggcatcttatccagctgcacaaaatgagcggggatcatatatccgggtaaatgccgggccattctttcgcgaagttcactgatctgtattgtcttatctgctgcaaagtatccgcacaagtaatattcatcatctgcatctttaagggcagctgcggcggcttcttgaatatcaggaacgttcagcatcaccgattcgatttcaccgagttcaatccgaaaaccttgaattttcacctgatgatcaatccggccgatatattcaatatttccatccggcagaaggcgggccagatcaccggttctgtacattcggtcctccggtacaaacggatcggcaacaaatttttcgtccgtcagttccggcaggttcaagtaaccccgcccgacaccgtcccctgcaatatacagctcgccttggacgcccttcggctgcagccgtttttttgaatcaagaatgtacattcggtttctgcctaacggcttgcctatagggacatagttttggctgcgtgcccaagcatcggaagaacattcaatgttgaacagagacgcgtctacgcaagtctccgtaggcccatatacattagtaatcccaggcgcagcgccatgctcgccgaataattgcttgagcttatttaccgtcgttttggaaagagcctctcctccgattaaaagatgctgaagcgtgactccctgcaaatcacctgcagctatcaaaagctttaagtgggcaggtgttccgtcagtgatgtcaatcgaatgctgccgatagtaacggcataaggcagcaccgtctgacactatctctttcggaacaataaacaaggtatggcctgacagcaaggaagcatacatttgctgaacagaagcatcgaaataatatggagcgagcatggctatattcagctccgcatcataggcagagtatacttggcggctcagcccttctatcaggtggatgacctggcgatgttcaattaacgtgcctttaggcttgcctgtcgtgccggaagtataaatggcataggccagttgactggactgataagagagtgcaagactgctgtctttttcgtgatagaaatgttcctccatgagatcgatacatgttcctgagaagccgatgtcatcctgcagcttcccgcagtaaagcaatacgctgatgcttgaatcatttaaaatataacggatgcgttcagacggagaatcaggatctatcggcaaatatgcaccgcccgcttttaaaactcccaagatgcctacaaccatctcaagcgagcgttcagtcataatgccgacaagctgatccgcctgcactccttttgcctgcaaggttcgagcaagctgattggcacgccggttcagttcttcgtaggtgaattgtttaccctcgaatacaaccgctgtattgtccggagtacgatgcgcctgttcctcgaacaactcatgaatcgttttttcacgcgggtaatgcatgtcattagactgaaagcggctgagcagatattctttttcttgctgagagagaagctccaaatcttctattttgacagacggctgccgcaatacttgctgcatgagtttttcaaaatgacctcggagccgctccacttctgatttttcatattcgttttcattaaaaccgaaatgaacggccagctgtttgccaggtatgacaaccacattcaaatcatagtgggagtgttcctgcatatgaaaattcgtaatgttcagctccgtaccatgatgtcccgtctcttcggcttgctgccctatcggataattttcaaagatcatgatatgatcaattaagttttgcttttgttccgtttgggcctgaatttcgtataaaggataggtatcgtacgattgggaagccagcgcgttttgttgaaccatttgcatcgtatcagcaaaagtgctgtcctcatcgcagcggatgcgaaccggaatcgtattgatgaacaggccgatcatctgttccacatcaggaatttccgccggccttcccgacacgacactgccgaagacaacgtctgcggacccgctgtatttctgtaataatactccccataacgtttggatcaacgtatttaacgtaacctgatgctgatttgcgatctgctgtaattgttttgtctgttcgtgatcaaatcggcagatcaaattggcataagcgtattctttttgttcatgctgcgctattttatgaagaagcgtggtttcacctttatatccttcaagatacccgctccagtaccgctttgccgctccctgatcttggcggtcaagccactcgatatagtcgctgtaaggaactgccgatagcggttctggttccctgccttcctgtaaggcgctataatgatcaaacacttccttcgtgataagagacaggcaccagccatccatcacaatatgatggaagctccaaatcaaatgatatttgcggtcttccatccggaaaatcgctatgcgcatcagcggatcccgagccaagtcaaatccttttgccttatcttctctttgataggctgcgattgcatcctctctcaggtgctcctctctatcacgcaaatctgcaaaatgaatttgcggtgtttgcgttttatagacaatttgtaaaggagtatcgttccagccgctgtaaaaacgggttctgagcacggcgtatgtttcaaataatcgttcaaggcttgctttaaaccaatcaatctttaactctccctgcaaatcgaacgatgcttgttcaaaataagaacttgaggcctcgtccaacaggctgtggaagagcattcctttctgcatcggagtgagcggatacacgttttcaacctcacctgcatgcggcagttgaatgaggagctgatccaattcgccaatggatatgccttttaacaaaatatcgcttggcgtcagttccgattgttctttatgaacgcaatgcgtaatgatggtccgcaggcggctttgaatcgtttccgataaccgcatgatcgtttcttttgcgtactgtttgctgctgtagctgatcgtaagcttcagcaggccctcggtgatcattccgtttatattcaatacatacggtctttcttgatttccgcttgagtctgaaccgcatgaataagaagataactggaccccatgctgctgtaaatcttggtcaaactgtccaaggtagttaaagctgatctcgggatttagtttcgatggcattccgccgcttaagtacctcgctattccatatccgatccctttatgcggaatttgacgcaatccttctttggtcgtcttgatataatcagagatttctttgcccggctgcgcgtgcagcacaaccggatacagacttgtaaaccacccgaccgtgcgggagatatctatatcttgtataatctgttctcggccgtgtccctctaaatgaatcggaatttgttccagtcctgaccaatgcgatatggaaagacccagagaagttaaaagcaaatcgtttatttccgtgtgataagcgcgattcgcttgttttaataagagctccgtttcctctttcgtccattccacagctgctgtttcactgtcttttgcagttgtatgggtttcatgaaaatctttaggcagcggtttgacttcggtttgttcgatctttgtccaatattcctgttcttgttttatggtttcactttgcgcatattctgacagtctcttagcccataattggaaagagtctgttttttgcgggaactggatcgtttgtccgcgttctgcctgctcatatccgcttgcaaaatcttcgagtaaaatacgccaggatactccgtcaatcagcaaatgatggatggcaatgagcagatgatctccatttgcgcattgaaacaacccggctttcattaacggcccatcacttaaacgcatactgctttgtatctcatcagccttggcttcaattgtacgccccggatcgggatcttctttcagattcaggacttctaagcggtacagcccgctttgggcgatttcttcattctgtgcctcacagccattttccgtagtccggaacgtcatgcggagcgcatcgtgatgttcagcaagcttttgcagggtttgacgaagctgcgtttcctgaaaaccttccggcgcatgcagcatgacggcttgattgtaataatgctgatctgttgttgtttgttcgaaaaaccaatgctgaataggagtcaggctgacttttcctttgacctcaccttgatcggctatacgcagattctgcttgatatgcggactcaattctgcaattgttgcatattgaaacaagtctttgatttccattttgtatccttgctgatttaatctggaggatacttgaatggatttaatggaatctccgccaagatcgaagaaattatcaagaatactgacgttttcagcgcctaataccgattcccaggcagaaactaatatttcttcagcttttgttcggggagctttatactctgctctgtcctgcagctcgaaattcggagccggcagcccttttctgtttatttttccgttagaagttaaaggcatttcatcaagctcaataaaataagccggaaccatataacttgcaagggtatgagacaattgtttccggagacgtgctgccgttgtttgcccgccgctcacgtaatatgcacacaattgtttaaacccgtggacatcctctctggctgtaacgacagcttccttgatcgcttcttcttgaagcagtgccgcctcgatctcgcctaattcgatacgatagcctctgattttcacttgttcatctattctgcccgcatattcaatgtttccgtccgccagccacttcgccaaatctccggtcttatacatcttcgctccgggttcaaacgggtcatcgacaaatttctctgccgttaattcgggacggttcaaatatcctcttgccacaccggcgccgctgatatagatttctcccgggacaccgatcggcgcgggtttcatattctcatcaagaacgtaaatgctcgtgtttgccgcagcggttccgatcggtactgattcccgcctgtcctttgcgggatcataacggtaaatcatgcagccgacaacggtttccgtcggtccgtactcattgcatatttcaatccggccttcgaactgttcatgaatgctgcgggctaaccgggtgcttaagttttccccgcccacaatcattcttctgacagccgtttgatcggcaatgttcatttctttcaaaacctgcaaatgggccggggtcaatttaatgatatccaccctcgggtcccgcacaatcgattcaagcagagctgttttatcctctccgtcatagacgatgattgcatttcctgtgacaagcggcgtgaaaatagaagtcaccgtcagatcaaaagaaattgacgaatacaatgggaagttggctttctcgccttttacataaacctctttcgcccaccaaatataattggtcaagcctcggtgctcgattagtacgccttttggccggcctgtggaacctgacgtataaatgacatatgccaaatggctcgcatcatttatcggagcaaggtcagagccatcttggtgataagaactttcatcatcaagtaaaaccgtgacgccttcataggcaagctgtttcctgacgtcccgctgcattaaaacgattccggcttgggagtcatccagcatataccggatgcggtcttgcggatattccggatctatagggacataggctccgcctgattttaaaacggcaaggattccgaccaccgattcgatgctgtttcttgtgatgatggctacaggctgatccgcctgcactcctttcgctcttaacgttcgcgccaggcggttggcccgcttattgagctctccgtacgtgagctgcctgtccttatcaatgacggctgcttgatcgggcgtacgctgcgattgctcttcaaataattgatgaaccggcgtctgcggaaacggcgcggccgtgtcgttaagcgtctgcagaagggttcttctttcgccttccgttaacaattccgcttgatccacccggatatccgcatctgtcacgacttgatgcaggatttgcatgaaatgttcccgaacccgctctatgcttgcccgatcatacacatttgcattgtattcaaaagagatgttcatctcgtcgcccggtataacggtcaaattaaaatcgtagttggtctgttcttccatttgtacgttggaaatcgtgatggatgttccgttttggcggcctatactttccatatactgatcaaccggataattttcgaatatcattaaatgtgtaattaaatcttgcttttgcgttgtacgcgcttgaatatcgtacagcgggtgcgtctcaaattgttgagacgctacagccctttcctgcgcctctttcataagctcagcaaacgttgtcccggcttcacatcggaaccggacgggaatggtgttaatgaataagccgatcatggtttccacgtttggaattccagcaggtcttccggatacaacacttccaaacacaacgtcccggctgcggttatatttctgcagcaaaaccgcccatgccgtctgcagcagcgtgttcagcgtgacatgatgcttgcctgccgtccgcttcattttcgaagtgagatcggagcttatgtcacacgtcactttttcaggaacgtatcgtccgtcttccgctgcatggtgatccttaggaaggccggtttgctcctcatatccctccaagtactgatcccaataagccgtggcctctttcgcatcttgccggccgagccattcaatatattgactgtacggagtaattgacgattgttcaggctgcttttgctgaagcaaagcaaagtaattctcgaaaatttcttttgtaatcagcggcagacaccagccgtccatcaaaatatggtggaaactccagataaaacggtatgttttttcatccgtacgaaggatgaataaccgcattaacgcgcctttttctaagtcgaacccccgcatcttatcttctctggcatactgctgaatcatcgcttctttttgtgattccttcacctctcgtaagtcattgaattgaaaaccgatttttttcgttttgaatatgatttggagcggctgatccttccagcctctgtaaaaattcgtgcggaaaatatcatatttttgcgataagccgtccaagctttttgaaaatgaatcaatttccagatctccatgcagatcaaacatcgtttgctgaaaataagcacctgaattcggatcaaataagctgtgaaacagcatgcccttctgcatcggcgttaatggataaatattttccgcttcgcctaattcacgcgtctgctccaaaagctgttccagttcgtcgattgagatgtcttttaacaggatgtcacttggtgtgagagaagtctgctgccggcttacgcaatgtgcaatgacttcttgcagactttctttcaacccccgggcaaattgcgccatagtagatctttcgtattgtttgctgctgtagctcagagtcagtgataatgtcccttcggcaatcatgccgttcaagtcaagcacggccgttctctcttggttttcgttcattgataaccctgtggaaaaaggcgagattcgcaaagcctgatgcttcaggtcttggtcaaattgtcccaaataattaaacgatatctccggattcagctgcaggctgtcggcttccgagtgcccggaaatatatttgatgatgctgtaattcattcctttgtcagggatacggcgcagcccttcttttacgatcttgatccgctgcgacaggttttttccggcttccatcctcaggacgacagggtactggcttgtgaaccatcctatcgtgcgggaaatgtcagcatccggaataatcggttctctcccgtggccttccaaattcacgacaatctcttccgtgcctgtccacttgtgaacagccagccctaacgaagtcagcagcagatcgttgatatccgtgttgtaggcgcggttcgcttgttttaataattgctccgtttcctcttttgtccattgaatcgtcacttcttcgctgtctcttaataacgctccttcgctgagagtgtccttaggcaatggctgaggctttatacttgaaagctcagtccaatacgcaatctcctcttccatatcggtttccgccgcatatttggacaattgatcggcccaggatggaaacgagtctgttttttgcgggagctggatcgtttgtccgcgttctgcctgctcataaccgcttgcaaaatcttcgagcaaaatacgccaggatacaccgtcaatcagcaaatgatgaattgcaatcagcaaatgatctccgtccggacattggaacaaaccgagcttcatcaatggccctttgtctaataccatgctgctttgaatctcattcgctttatcggcaatcgcttgagccggattggtttcccctttataattcatcacttccagatggaatagttcactttcatctgttcctgtaattcgcggagcgtatccatccggcgttttttcaaaaatcatcctcaaggcatcgtgatgcgacgcgatccgttccatcgtccggcgaagcgggccctctttaaagccttccgccgaatataacatgacggcctgattgtaatggtgtgcatgcggcattttttgctcaaaaaaccaatgctgtatcggggtcagcttggttccgccattcacttctccttgatcagccactctgctgaccggtgctacaaactgactaagttcagcaatcgaggggtgtttaaacaaatgcttcatatcaatcttgtatccggcttgatacaatctggatgacacctgaattgatttaatcgaatctccgccaaaatcaaagaaattatccaaaattcctatacgttctgcccctaatacttcttgccagatagacgccagcagttcttctattgtgttccgcggggctatgtattcgttttccgcccgcgtattttcgtcagcagcaggcaaagctttcagatcaatcttcccattggaagtgagcggaatgcgttccaaagggataaagcgggagggaatcatataattcggcagttcccgggataattcttctctgaactgcgcagcggtcaaagaaggctcgccgacataataggcatacaattgtttggccccgtctgcgtcttcccgcgcgacgactgcggcctcacgaacgttttccagattgaacatggctgcctctacctcgccgatctcaatccggtagccgcgaattttcacttgatgatcaatccgccctaaatattcgattcttccatccggcagccatctggcgagatcccccgttttatacatcttttgaccagggacatgcagatgctccacaaatttttcctccgtcaattcaggccgattgaggtagccgcgggccactcccgctcctccgacatacagctctcccggtacgccgatcggctggatttgatggtgcgctcctaaaatataagcttgatggttggccaccgggctgccgattgtgatctgttcatcagcggactgaacagggtgaaatgtagataccacgctgttttctgtcggtccgtattcattattgatccgaatgcgaggctgcagagaatgcagcttctcaactgtatctgcttccagctgctcaccgcctacaacaacatgctgaacatggatgaaatcctctctgttcatctgttcgatcatcgttttcagaagacggggagaagttgaaaaatgggtaattctttcttgttttatggcattttgaatggcgaaagtttctttattctcttcattaggcagaaggtgcaaagttgctcctgagatgagcgggccgaagaaatttaaaatgaacgcatcaaaaacatacgggtacaagacaagtacgcgatccgccggagaatgcctaaaaaacgccttcttccactgaagcgagttcacaatgccgccgtgttcaaccatgacccctttcggctttcctgttgtacccgacgtataaatgacataggctaaatggctgtgtcccgctactggtgataacaatgagcaatcggcatggtatgatgtttcatcattcaaatcaatcaccgggccgtcaaaggcgaggctgttttttaaatgatgctgaacaaggagaacgtctgcatccgcatcatgaagcaaatattgaagccgctcttttggatattcaggatccaggggcacataagcgccccctgccttccaaacagctataatggatacgatcatctctaatgaacgatcagcgagaatggcgactaacgtatcgggttgaaccccgcaattacgcaatgttcttgccaaacggctcgccttctcattcagttccctgtacgtcaaatggtcgtttttaaacttgacggccgcatgctcaggtgttctttccgcctgctcttcaaataattgatagactgttctgctcccggagaaatctctgacggtgtcgttaaaatcaaacaatagcttctgtttttccgcttccggtaagatctctgccgtatggatcgcggcttgaggctgaaacaggatcacagacagcagctgatccaaatgggatacaatttgattgatatagcgctcatcgtacagattgccgttataaaaaagcttcaaatgtatcccgttgttctccaaatcaaagtgaaacagcgtatcggttgcagtatcttctttacattgcatggaatgaatttcgttaagcgaaacgacggtatgaatcaaaggcatatgctcgtcattgtattgcacgctcagatgccggaccatttttctaaacggcaggttttgatttttcagagaatcattaacggcttctttcagctgcccgaatacggttttaaatgtgctctcgtttgaaagcgtattttttaagaggacaatgttgttaacggctgactggccggctttttgcttcgataccgttggaatgccaagaatcaggctcgttcgatccgtatatttatacaacaagcattcaatacccgccaataaaatcagataggccgccatatcggaatgattcgccattgtcatgattctttgagatacttccggagataaggaacggcagatgcatttttcctggtagccggtacgggccaacgacgctttatccgctgctttaaagtaagggaatgcgcttaggccgtcttcttcatcaaacaggttttcccagtacgtttcttgagttttaaataccgacattggagcacctcattttatatattttaaagaaataatgcttttccctaaaagttcaattgaatagaatcaagcgcgttctcttcttcctcattgctgccgctcaatccgatatgttcgattagaatgcttggctgttccaaaatcgccgataggatgtgtaagtagtcgtttgataaaacctcgattctgcttttcttaaacagttttttcgaatattcaaacagtccgtaatagttgtcgcggtccgcctgaatcgacaaggtcaaatcgaatttggcaaccgaatgatgaaatggatacggcttgagttgaagggaatcgaaaatcaattcagcatgatcaagattttgcagcacaaacatcgtatcgaataaaggattgcggcttgaatcttttggaagatgcagatgctgaattaattcttccaacggatagtcttgatttttataggcgttcagcatgttttcttttacttcgtttaagtaggcatcaaatgttttacggctcgccgggtgattgcgaatgactaacgtattgacgaacattcccacgaccggctctacatccagatgagtccgcccggcagatggcgttcctacgataatatcttcttgtccgctgtatttggataaaagaatcgtataggctgccaataaaatcatatacagtgttgctcctgtgtcttcttccatttggcttaaacgctgtttcaagtgttcgggtataagaaattcaaatgattcgccttcgtaatcgcgtatggcaggtcgctcataatccgcaggtatatccagtacaggaatatcaccgtgaaactgatccagccaatacgcttcctggctcttgatgttccgtttctgaaggtccgattgctgccaaactgcaaagtctttatattgaatagagagcgggcccggttcgttcccctcgtagattcggcttaaatctttcatcagaatattgacggacacgccgtcagaaatgatatgatgcatatcaaccacaagcacgtgccgcgcaggttcaatttcaatcagtccggcccgcatcagcggcggtttggctaagtcaaacgctttgatgaaatcaagcacacggtcttccgcctcttcttcgctagcttgaattcgttctatcgtaaagtcgacgttctgatgaatacgctgtgccggctcgccttcatataaatcaaagctggtacgcaatgcttcatgacgcgcgattaattttcggaaagcggcgtttaaccgttcgggatcgatcgtcccttccactttcatggcacccgtcatattgtaagtcagctcgccgccttctgtgtgacttaataaatacatccgcctctgagctgaagaaaccggataatatggcatttcctttgcagccggaatcggtacatatcgatttttgtccatgtgtaacgccttgtcagccaattgttcaatggtaggaaacttgaatatgtctttgagagacagattcacatccagctctttgtgaattctggcggctaaggcagccgctcggatggaattgcctccgagatcaaagaaattatgtttgatccccgcatggcttattccgagcacttccttccataaatctgtcagtttggactccgtctcattacccggcggaacatattcagctgtctgttgcagactcgcttctggtgcaggcagtgccttacggtttattttcccgttggatgttaacggcatatgctccagatggacaaaataggacggaaccatgtagtccggaagctccgatgacaattgttccctaagctgcgcagccgctataggcttgtcgcttacgtaatacgcgcataattgttttaagccgtctttttcttctttcactgtaaccgcggctttttgcaccgcttccgcgttatgcatcgctgcttcaatttcaccaagctcgattcggtgtcccctgattttgacttgttcatcaacgcgcccaatatatacaagatttccgtccttcaatcgcttagccaaatcccctgatttgtacattttcgctcccgggacatacgggttttcaacaaatttctcttccgttaaatccgggcggttccaataccctctggcaacacccggtccgctgatatatatttcgccgattaccccgatcggaaccaggtttctgcttgcatcggccacataaatatccgtgttggcagccggagtgccgatcggtacaaattcccgcttgtcccgttctgcgtcaaagtgataaatcatacatccgacgacagcttccgtcggtccgtattcattgaaaatgtccagccggcctttaaactgctcgctgacacttttggccagacgggtgcttaaattttctccgccgacaatcattttccgtattgcggtgccgccagcgatgttcatctccttgatgacgtgcagatgtgccggggtcaatttgatcatgtctattcttgagtcccgcataatctcagaaagcacagcgcttttgtcttcgccgtcaaagacaatgatggtatttcccgtaaccagcggcgtaaatatcgaggtcacagtcagatcgaaagagatggaagagtataatgggaagttggttttctcacctcttacataaacctctttcgcccaccaaatataatcagccagcccctgatgctcaatgaatacaccttttggatttcccgtggaacctgacgtatagatcatgtaggctaaatcatgcgcatcgctgtccggttcaagattcgagtgatcctcatggtatgagttttcctcatccaaaagcacaacgtcaccatcatacgggaattgatccagcaggctgcgctgtgtcaacacaacctccgctcttgaatctctcagcatatattgaatccgttcttccggatattcaggatcaatgggcacgtatgcgccgccggctttcagaacagccaaaattccgacaatcagctcgatccgatgcgggcagatgatggcaacgaattgatccgcttgtacgccttttgtccgtaacgtccgcgccaatcggttcgcccgttcattgagctgtctgtacgtataccgctcattgccaaaaataacggcttcatgatcgggactctgttcagcctgcatttcaaaccaccgatataccgtttccttatgcggatacggcgtctttgtgccattacactccgtcagcagttgatgccgttcggtttcagacagcataggaacggaagacaatgtcatctccggctgctcagcaaggctgtttaaaatggcggtatagtgtctggtaatctgttcaatggtgtcttttgtgaatcgtcccggtttataatcaaaatgcatctctatctgttgaccggcatcttcgatcgtgagcatcaaatcatacaaagagacccctggatttcgttctttcactttaaatgtacattcattgtgccggatttcatgaaattcaatgttttgaaacacaaacatcgtgttaaacagagactttccggttgtttcccgctgcacatttaatttctccacaagccggtcgaatggatagtcttggttttcgaaagcgtcaagcgtctgccgctttacttcttccagataatccgtaaacgttctattggcgtgcggcttcgtccggattccgatggtttgtatgaaaataccgatgattttttcgatatccggatgatttcttcctgatgcaggcgtgccaacgacaatgtcttcttgtcccgtatatttatgaagcagcacattataggcggccagaagcactgtatagagagtggtttccgccttttgcgccaaatcttgaagcgaacggatgacatccggctgtaaggagcatgtcacacgctgtccctcagaagaccgttctgccgctttggaaccgtctgtcggcaggtcaaggatgggaatttcgtcttgatattgttccagccaatatgtctcctgccgcttcatggcatcgtcattcagccgttggttttgccattctgcgaaatctttatattcaaattcaatgtccggtaatggtttctgatgatataaagccagcaattcatttgtaaggatgttgacggaataaccgtccgaaatgatatgatgcatatcgatgagcagttcggcctgctcgttttcaatcttgatcagctccgcacgaactaacggagcttgatccaggcggaacggttttacaaaccggtctgaataagcatcaaattcgtcccggctcattgtccggacatgaacgttaaaatcaactccgttttcaagtttctgaacgatatcgccatctataatgtcgaaatacgtgcgaaacgcttcgtgccgctgcatcacttgttgaagagatgagatcagggcctgctcatcgtacttccctgttattgatatgtggccgaacatattttgcgccagctgatccggttccagttggtgcaggaaatatactctttgctgtgccggcgatgtcgggtaatacgcttttttctcggcagccttcatcgggaggtgcacgactttcgtttcgttctgaatgaaacgtgctaattccttaacagtctggtgattgaaaaattgtccgatggaaaccttttgatgaaatgtcttctgaactttggaaagcataagcgttgcctggagtgagtttccccccagagccaggaagcgatctgatctgccgacccgttcaaggccgaaaagttcctcccaaatccgcgccagctgccgttccgtttcatttaccggcgcctcataggcttcagtaaaatttgccgtattgcttcctattgaagagatccgcttctggtgttcggcgtaaagtgcttgtaaatcatgctgttcttcatcggaaaacatcatcatggcgttaagagggattgaatctccctcaaccattttttgcagcaattttgtaaaacccgctccccactttttcatgatttccggactgatgacgttcgtattaaagtcgaaatcaagaacatattcttgatgcgcgtctgttatgttcagaaataaatcgtacagggtgcattttaccgggtatgcaacgggctccgcttccgcctttccgaaatgcagttttcgaaaaggcctgtctaaattaaagataatacgcatatccggcacttgatcgtgcggaagctctctggccaccagtgtcatcgggacggcttggtgccgcattgcaagattcacgctttctttcatactgccaagataaccggataaagtgctttctgaagaagacgtgttcttcaccggaatcatattgacgcaatttccaatcagatcatgctgtttcatatgcgattgacctgcagcggggatcccgatcacaaggcctgactgtttggtaagccggtgcagaaaaagatgaaatgcgcccagcatcgtcacaaatacgctatttttcatctgaatgcttaatgaccttaaagcctcgctcaatggccgtccaagcctgacggtacaccggtctccctcatacccgttcggataacggacagaagctgtgcttggcagaattggctgctgtatcggttcagaaaaatgacgccgccaataacggaccccttcttcataatggccgctgtcaatctgtgcctgctgccagtctaagtattggcgaaacgaaacatctgcctctttcggtgaaatcggtattccttgtacgattgccgcgtagctgctctccagttcttgaacaaaaacggcgattgaccatccatcggcaatgatatgatggaacgtgagcacaatcagatgttcattgtgagccgatgtaagcacatggattctaaacaaaggctcttgttcatggaaatgaaacggccgcttggcatcttctgtcagccatttttggatttccggctcccgatgttcatgcgggtgaccggtaaaatcaatgacaggtatatctatattcatccgttccagcacttgctgtacctcgtcatcgggatgaatcaccgtacgtaaagcttcatgacggtcaacgatatgccggacggcttgttttaatgatgtatactgcagttcgcccttcactttcagcataatggactggtttaaagcggcggaagcttcattcccgtaataggatgccataaccaactgcttttgttcaggtgaaagctcgcgcgtcccggactttttacggcctccgccatcaggggaatccgggccttccggaataaatccgcctcggcgaagatcctccaccgtgtctttcaccgcttgaataatattttcgatatcatccgcggtatgcgccgcagacaagaagcagttgcgtccctcccacacatagacccctttatagttgagatggtaaaagaacaagtcattatcaagcgatgagacaaaccggaataaagaaccgaatcgaaccatgcggataggcacttgcgcttgttcgaagcagcgattcagctcatcgaccaggtaggctgttttttgattaagctgctcatacagatgctctccttcggtttgtaaatggcgaaggacggctaatgacatcctcatggtaagcgggtgagtattgaaggtgccggccacaaacgtgcgtttcgcctcgtcttgcgggtaggaatcgtccccatactgccaggtacccccgtcgatcgtattcatgaactcagcttttccggcaactacccctaatggctgtccgccgccgatgatttttccgtaggtcactaaatcagcctgaatgctgaaccattcctgtgcgccgccaagaccgatccgaaatccggtaataatttcatccataatcagagctgttccggattgctgcgtgatcgcccgcaattctttcaaaaatgcctgcggctgcaaatccggtctgcggctttgtaccggttccaccagtacggctgccaattcatcaccaagactgcggatcacgtccagcgaatcgggattgttgtaatgtaaaataatcaaatcatccataaagctctgcagtatacccggagccagcggattcgcagacgcagccccgccttttgtgccggctacccctaatacgccgtcaaacgtgccgtgataagatcccgagaacgccacaactttctttcttcctgttgccgcccgcgccaaacgcagggcaaccatgacggcctctgttccggaattatagaaagcgaccctttccactccggtacatgtgcggatccggtcggcaacttcaccggcgacatctgacatcgggccgagcggaggcaatgatgaacgggttgaatcatcgataacctgtgtaataaaggaaggatgatgcccgaacaggttaaccccgaatcccatggtgatatcgatatattcatttccgtcaatatcccacattttagaaccgtcagaacgttcggcgataatcgggtatacgatttccttccaatacgaacggaagctggacaaattgcggttgtttgcatgagcaaatcgggtgttgtccgtatattgtttggaacctttcgttttatcggcgtatttcttgatgaaatcttctaagtattgtttttgccgtgcggtatagtgcccctgatcattcaggttctgaggctgaaaaggaacatagggtttcgcttcttgagccgctttcttttctgcagtgacggtcggaggcccctgcttgacagaaggaattgatttctcttgcgctttagcgtattctttctcatcggaatgatgtccgctgtttctcaacaaattaaagctatttaattgagcttgcaaggtatcctgaattaattgattctgagaagcgattattttttcgagcatatgctcttgatgaccttctctgcgatccgattcagactgcgcttctgaaatgacctgtatttcctgcgccggtacattctcttgaggcggagcggatgcaaaggacgatggaacggtatcagccaagtaatctatgacactttgaaggttggtcaacgtatcaaaaaaacgatccatcgggatatctaccccgaattcgtccgcgatggcttttttgacctgtgacagcatgatagaatccattccgagcccgataaaatgagcattcagatcgagttcctccgctctgatccctgaagcattgctgattacagttttcaggaaggatttaatgtgcgctttcgattgattgatattcaatgctgctcctcctttcttttcgccctcgtttaagcgcaattggtcagcttcagcccagcatcggctccgttcaaacggatacaggggcaatggcgtcttttgtacagtttcaccggaataaagcgcgcgccaatcgataacggctccttgcacaaataattcggctgcgcgatgcagccatgtgatccgttcatcttgcgtacgtaaacgctgcttaatcagagcggctgcttgttgattcagctcttctttatgagcaggcagcatttccttcatattcttgtaaccgatgtatacaccgggaaggtttctgtctccctgaatcaggcgggtcagcttatccgatagttcttgtttaccggatacaatcatggcaatgccatgatctaaatgagccctgcccgtagtggctgtatagcaaatggactttaatgaagcttggctgtcatccgatacatattgccggtactgctgtgcgagttcatagagtgatttttcagtatgagcggataaaacaaataggtgcggcccatgttcatcctcgggtgcatactcactttgagaaatatattcttccaataccacatgagcgttcgttccgctaaagccaaatgagctgattccgcctcgcagcggctcatcaccggatgtgaacgctgcagcttcctgattcacataaaatggtgatgtgtgaaaatgaatgagcggattaggttcattaaagtgcgctaacggcggatttttcttgtgattcagcatgaggacagatttgatcagcccgacgatgcctgccgcttcaaacaaatgaccgatgttcgatttaacagaaccaatcgcacaaaattgtttttttgccgtatacttttcaaacgctttacaaagcccgttaaattcaaccggatcgccgagcttcgttccggtgccatgcgcttcgatgaaagacagtgtttcaggggcaatgcccgcgtctttccaagccgtctcaatgacctcagtctgagctgccggattcggtgctgtaatcccggcggttgttccgtcttgattcatcgcgcttcccttgattacgccgtaaatatggtctccgtcgcgaacagcatcctgcaaaggttttagcaggactgcggccgcgccttcacctgtgcccgtgccgtctgaatctttgctgaacgttttcgtgtacccgtccgaagattccatatcaagtccgatacagatcggcaagagcgatgtccggataccgccggcaagagccatttcacaatcgccggacattaaagatttacatgccatatgaacggcggcaagcgatgaggagcatgccgtatccactgtgaccgccggcccttttaaatttaagaaataagcgattcggctggctagcacggaagggagattgcccacgatatattgatgaagttcctccggataattcgcagaaaggagacgttcataatcgtagcccaccttcgagtaccccgcatataccccgacacggctcccgttcatgctgccgccggcatagcccgcatcttcaatcgcatgccatgcagactgcaaaaacagtctttggttagggtccataaactgagccgctttaggagctaaaccgaagaacgaataatcaaagcggtcgatttcatctaaatagccgcccttcacaaactgactctcattgaactcgctttggatggactttaaataatccgccgcatctttcagccgggattcggggtattctcgaatgctgtgctcacctttttcaagcagattccaaaaatcacttttcgttgacgctcccgggacattgagcgacatcccgataatggcgatatctttcggtgtcacatggcttggtttcgctgccgcgtcctgtttgatttcagcccggctttcagacagatataccgctaaatcagtgatagaaggatacgtaaagagatctgaaacggcaagctcgcgtccgaatttctgttctatgcgctcggcaatctgcgataactgtaatgaatttgctcccatatcaaaataactgtcagcgaggtgaaccttttttccatcgagcacttcggaaaagatagacagcaattccgtttctatctcatgaatgggtgtctgtccggatgtttccgggctgctctccaaacattcattgatggcggcagactctgttgaaaaattccctgcctcatactgtctggcaagttcgtagcgtttaacctttccgctggttgttttagggagttttcggatcggaaggacttcttttatgctccagccgccccgcttgtacaaatgcttttttatctctttgacaagcggtgcgaatttttcaggtgattttttgtaaacaacaaagagcacgatttctccgctttgtgtcttttgatcatatacaccgcaggcggcaacccttcctaagtcaacctcttccatttcaatcgcgacccgttcaatatcgtgcgggtagatattttttccgttcacgaaaataatgtccttttctcttccggttacgactaagttaccactttcactaatgaatccgaggtctcccgtttttacccagccctcagaagtcagcgctttttccgtactctctgggttgttataatacccttgcgtcacattgtctcctttgatctggatatggccgatgattccgtcttctactctttcatttgtttcatcggagatccgaagctgacaatagtcaataggttgtcccacctcaacgaatgaagcgcaattttggtcctctttgctgacttttacagctctttcaccaagatttaaatagtcacgatgcaaataaacgggaacgaattctttacctattttagagaacgctgcgccaaccgaagcttccgctaaaccgtaaacattcaaaatggcggatcttttcagattgaatgctgcgcatcttttcaaaaattcgtcacacagctccggtaatatcggttctgcaccgtttgcgatgaccttgatgtgggataaatcccagtctggttcatttttcagaaatttaaggaagtagttgtacccgaaattaggagatgatagaatactggctttatgttcatgagcttttttcatccaaagaataggtctgcgaataaataactctgtaggcattagattttgattgattccggttatgaagggaacaaggtggcaggcgatgagccccatatcatgcgttaaaggcatccatgataagaaagagtctttcgaatgaacggctagggcagtcccaatggcgcacgtgttatgtattaagttgtgatgcgttaacatgactccttttggatctcctgtcgatccggaagaaaattggataaaggcgagttcatccgcatcaggttcataaaatgaagcggggtaatcgtaggtttgatcttgaatgatgtcagatttttcgtttaattgatgatggaaatcctgtaaatcgtgttctgcagcgtatttctttattttgtccaatactttttcagaggcaatcagaaacggatgatttaatatattccaaatgcgccagaccttcagtttatggtcatcatcttctccgatactgaccggcaccgggatcattcctcctaatatacaagcccaaaaagcaacgacaaatgatttgttttcttggatttgaaatacaatttcctgcttcggcttaatgccgagatgctgtaaatagccaagatacccttgcgcctcttcaaacaattggcggtaagagacaaccgtctcgtttttatcggattcgataaaacggatcccgcgatcagagatactgcttctttcccgaatgacatctactaaggtttggaattgactggtatacataggtcccctcctgggcgctttattttaaaatccgcaattcttcccaagccggaagctgtttagcttcacaaattaatttgcataaatggatcgaatgttcgagttcttgttctgaaagcacgtcttcatgccttttcattctctctttcagctcttggatttgcgtaaataatggcgtcgtcatagtggaataagccgctgaatccttgttgtaatttcgcgcaatgacggattgaatcatcaatttattcagttgttttttgcgtaaatggacaatatgtttctttctttccgttgaattggaaagcgggggaacatcagatgtctgtcctaagggataaggtacaatgtgattcgttgtttttctcagcagaccggctaagacattgttcggacccatttcgatgacttctatgactccatgtaaaagcaagtaatgcatcgattctgtccatctaaccggcatcgtcatgtgctgcttgagatgttcgctgatcgaatttccgctgctgtaagggcgcgcggtgacatttgaaatgatcggccatgcggcatcccggaaggaataccggtgtaaaacagtctggaattgttcggaggctgatcgtatcatcgaactgtgaaaaggcgcactgacattcaaataagtgtatgccgcacccttttcctccgccatcttgatgacacgttccacagcttgccggtgtccggaaatcacatgctgctgttctgaattcatgcaggctacacctgccggaaagtcttccgtcgatactttcgaacatatttcctgcaacgtttggagagagagctgtgtcacggcggccatcgtcccctgctgctggggatccgcattttgcataagaattccccgctcccttacaagtgtaacggcatcctgaaaagaaagggcgccggcacagacaagcgctgaatattcgcctaagctatggcctgccaggaagcggggcttcacccctatttcctgcatatacacttgaaaagcaatcacactgaccgttaaaatagcgggctgcgcgttcattgtctttgtcaattcattcatatctccgttaaaacacagtttttttacatccaaggagatcgcatcgctcgcttcttcaaacaatctctttgcgagcacaaaatcattccaaaattgtttgcccattcctacaaattgagacccttgtccaggaaataaaaaggcaagattgttcatgagattcctccgatcatattgaacaggggatacaatatcctacaaaatatccctttatctaacatcctagcatgattataacaaatgtgtatagaatactttcggaggagttattgttcgttttcacaaacgaattagatatatttattcataaaataaaacatgggggtttcgccgaaaatcagtcttaaagagagatgatgaaagccggcgtggagcctgttaccggctcttcttcacttcggacgcgctcttcatgtttcatatgttttagggctattggcattattgtgtcagaaattacatattttctgtttattgtaaaaattcatttgtatatctgtgaaggattgtaaactgattgcgcttaattataaatgtggtgcaagagatggatctggatggggaaaatccgcaaggacgaaatacgccgcagaacatgcgaatgaccctgcccggataccgattgacgcagtaaatcggcctattgagtgaacaaggttttcaggcataaaaaaacagccgttcagagcggctgtttttttaaaaagcataagaactattgagcggtatacccgccatccatgactacggcttgacctgtgaccccttttgctttgtcgctggccaaaaatacggcgtaatcagcgatttccttcactgacagcagccgtttttggggaacgagcggaaagatgacgtcctcaagcacccgctcgtacggtacattccttgttgcggaaatgtcctttaactgattgcggacaagctgagtgtccacatatcccggacaaagcgcattgacggtaatgccgtcagccgcgccttcaagtgcgccgactttcgttaaaccgatgacgccgtgcttggcgctgttatatgccgctttcccgtgaaaaccgatcagtccgttgacagacgccatattaatgattcgaccgaattgctgttttttcataatgggaaatgcatgcttcattgcgataaatggcgcagtcagcatgagacgaatgagccgttcaaactgttcggtgggaaattcctcgatgggcgcgacatgctgaatgcccgcattattcacaaggatatcgagacgtccgaattgtttctcgaccgtctgcagcatgtcggccacttgcttttcatttgttacatcgcatgtgatgctgactgcttcacagccttcatctttcagtcttgccgccgcttctttccccgcttgttcgtttacatcagagatgatgacggctgctccttcacgggcgaattcttttgcgatttcaagcccgattcctccggctgctcctgttacaacggctgttttttcaataagcaatgaatgcatgacggcacctcctcattttggtctgaccccgttttttaacgactggctgacagtaaaatgaccttctgttttctcaaagacctcctctattgttacaccttcctgcagttcggtgagcgtcatacggccatcatgaaaatcgaatacagccaaatctgtgatcagccgatcgaccacctgcctgccggttaaaggcagcgtacattccgttctcactttagattccccatatttattaacgtgctccataatgacaataatccgttttgctccgtggaccaagtccatggcgccgcccattcctttgatcatttttcctgggatcatccagttcgccaaatctccccgttcggagacttccatcccgccgaggatcgctacatcaatgtggccgccgcgaatcatggcaaaggattcggcactgtcaaaatacgaggctccctttacttcggtgatggtttcttttcccgcgttgatcagatcggggtcctccgttccttccgccggataaggcccgatcccgagcaagccgttttcagactgaagcaggacgttataatcattcggtatctcattggctacaagcgtcggcatccctatccccaagttcacattcattccgtccttaatttcctttacagcccgtttgatcattcgttttctgctatctctcattctgtcagcctcctttatcatgcttgccggacggtgcggcgttcaatccgtttttcatgaatcccgccgagcagcacgtgctgcacaaaaatacccggcgtatgaatttgatccggatcaagctctccggcatcgacgatttcttcagcctctgcaatcgtcactttgcctgccattgcagcgagcggattgaaatttctcgccgtctttctgaacatcaggttgcccagaggatcggctttccaggcctttacgatggcggcgttccctgtaatccctttctccagaagataggtgcgcccgtcaaatgtcttatgttcttttccctcggctactgatgttccgacgcccgcaggtgtgtaaaacgccggaatgcctgcccctcccgcgcgaattctttctgcgagcgttccttggggcaccaattcgacttccagctccccgcttaaaaactgccgttcaaaggttttgttttctcccacataggatgcgaccatttttttgatctgccggtttgcaagcaagaggcctaacccccaatcatcaacaccgcagttattactgacaacggtcaagttttttacgccgctgtccctgatcgcgagaattaattgttccggaatgccgcacaggccgaagcctcctgcgatgagggtgtctccgtccttgatcagtgcagcagcatcttgataagagtccatcacttttccttttcccatattcgtttcccctttctgttttggctacacaaggcccgtcagactgtaaatggcgatgatgacaaacacagcggctgttttaatgacggtaatggcaaagatatccctgtaggattggcggtgggtcaacccagtgaccgcgagcagcgtaatgacggcgccattatgcggaagagtgtccatcccgccggaggccatcgagatcacccggtgcatgacctccggcgggatgtggaatgtattgattgcttctgtatacgctgctgacatcgtgcttaaagcgatgcccattcctcctgatgccgatcctgtaatcccggcaagcgcagtggtcgtcaccgctccgttgacgagcggatcagtaaacgtctgcgatatgccactgctgaccattttaaagccgggaagcgccgcaatgatcccgccaaatccgtattcggctcctgtattcatcgacgccagcaaggcgcccccgataccctcattcagtccctctttcaaattgaagaggacttttttccaatcgaacaaaatcgttgtcatgattccgatgaacagtgcgagttctactgaccagatcgcagtgacggaggaaaggtcaatcttcccgaacgcttctagcccgagcggcgcaaaatcaaatccgtcagggtaccaatgcgggagccacatcgtgaagcatttgttcatgactcccacaaggataagcggaacaaaggcgagcacttgccgcgcggggctgggttgcggtaaaacaggcgtatgtgtttcattagccagactagaggattcctctgcagcggaaacttcagattgaaatccagcatagccttctccggcattggccgcttttttgcgccgggattctaaataaatcattccggccgtaagcacaaatgctgcaccaatcagtccgagccagggagcggcataaatgtttgttttaaaaaaagcggtcggaatgacattttgaatttgcggtgtgccgggaagcgcatccattgtaaatgtaaaggcgcccaatgcaatcgtaccgggtatcagacgcttgggaatatcagctttaataaataggtttttagcaaacggataaatggcaaacaccgctacgaagagactgacgccgctgtacgttaaaatcgcacccattaagacgatggcgagaatggctctttttgctcccacaagtctgacgattgtttttgcaatcgactcagcgagcccggatatttcaacaaccttgccaaaaacggcccctaaaagaaatacgggaaaatacagcttaataaatcctaccatcttctccataaatatattcgagaagaaaggaagtacgaagcttggatctgtcaggagcacagcaaacagcgcacaaatcggggcgaataaaatgactgaaaagccccggtaagccgcaaacatcagcatgcctaatgccaataaaataataacaatgtccacaaatccccctcttttctgctcaatattagtaagcgcttacaaaaaatcgagaaaataaagcaaaaaacatgccggttttgcacaggttctgaggctgaaaaaatgtgcatcatggtgaatgttccgttttggcgaaagaaagggagactcttgctgtattagattgattggctgagcagtgagtttttttagggatagtgagatggatcagagaggatttttgctttataaatatgtattcttttttctttcatttatttcctgcaagaggaaccgataaaatccggccctcctgcatggtcattcagccaatgacaaccgggagctctttgagcgacctaaaaccaatgagcttgcggtattcaaggcggtgtgcagccagccgaagcttaggtatccgctcaaacagtgtgagaattgcaatttgtgcttcgatgcgcgctaatgaggagcctatgcaaaaatgggcgttctttccgaatgcaacatgcgggttcggctttctttggatatccattttgtgaggttgatcgaatatgcttggatcgcgattggctgcccctaaaaggatatatacctgctctcctttttttatggtcttcccatttatttcgcagtcttctgaggcggtgcgtgccgtcagctgcgcggggctgtcgtagcgcagacattcctcaactgcagtttcaataagcgaggggttttctctcagtgcgctaagctgttcagggtgtttcaataaagtaaacacaccgttgcttatgaggtttaccgtcgtctcgtgtccggctatgacaagtaagatacatgtcgcgagcacttcctcttttgaaagctgttcctccataataaacctgctgatcaagtcttgtttagggtgcgcttcccgcttgtgaatcaaatctctgaaatatgacgtcagcctgcctgcggtgtcgcttgctctgactaacgtctttcttgatcgggtaagatcaatggcctgaatgacgtctgccgtccattgtctgaattgatatctctcctctttcggcactccgagtatctccgcaatgataaggcttgccaatggaaaggcaaactctgaaacaaggtccgcggtttttttgatttggacttgatccaacaagtcatgaaccgtttcttttatacaagggcgaagtgattccgccgtctttgcggtaaattctttaccgataagcatccgcatccgcttatggtctgattgatttttaaataacagcatatcgtgctggatatgcgatagattttgatatttcgttgaagcttccggaagaggaatgcggtttttaaaccgaatgtctttcagaatcgctgccgcttctttgtacccggtgacataccagcccggatattttaatacggttcctttataaacaggatcaatggatcgcagtttgtcataaaacgggtaagggtcattccaaaaatccgaatccgcatggagagacggatgtgcaatcgataggtctgccgtcatcttatacctccgtattgcaggcggattgcaggccggctttcatttcttcaacggattcgacttcaaaacctaaatcatggagcatttgatgatcctctgtttcttgctgccctgctgtcgttaagtaatctccgacgaaaatcgaatttgcggcgtaaagtcccagcggctgcagcgaacgaaggttgacttcccggcctcctgagatacggatttcttttgacggattgataaaacggaacaaggcgagcactttcaggcaatacaccggatgtaattcgcttaccccttctaacggagttccgtcaatcgcatgcagaaaattaaccgggatgctgtcggcgtcaagcgcttttaagctgttcgccatatcaatgacgtcctgtttcgtctctttcatgccgacgatgacaccagaacaaggtgacatccccgattgtttcgccgtttccactgtattgaccctgtcgtcatacgtgtgggaggtcgtaatgtttgagtgatttctttgtgatgtattgatgttatgattgtaccggtctactcctgcctgtttcagccgctctgcctgttccggcttcagcagaccgaggcatgcgcagatttttaaaccgtacgtttctttaatttctttgacagcatcaacaacttgatccacttctctgtttgacggtccccggccgctggcgacgatacagtatgtccctatattcaggtcgtgggcgcgttttgcccctttaagcaatatatgcttatccaccatccggtaagactcaatcggcgcttttgatattgaagattgtgaacagtacccgcaattttccggacacaggcctgattttgcattcataatcatattcagctttactttttttccgtaaaatcgttttctgatatgaaaagcggcatgcatcagcaataaaagatcctcatcaggacaatttaaaatggccagcgcttcttgattcgttacttccgccccgtccagcactctctctgcaagatccatccattgattcatgtttatctccccatttgtgtcagattcatgaaagaggaaacatctatatgtttctcaatcatgtgttgaatgttttccgatgaaacgtgatccagcttcggtgtgattcccaaaatcggaactttgcataatgtttcaatcatgctcgggtttgtcttttcgtccagccccggcctgctccttacgccgttgataataatgccgagaacctctatccccatgtttttcgcatattcaacggttaaatatgtgtggttgatggttccgagatcaggcctggccacaatcaccgccggcaattccatggcttttatcagatcactgactaaataattttcaccaagcgggacggaaatgccgcctgccccctcaacgatgaaacactcatgacgatttttgatcttactccagtgggccatgacatccgccatgctcacggatttcccctcaagcatggcggccgtgtacggggcaagcggctctttccattcaaatggcgtgatttcttcatgagacagtgcggtttgtgacatgtctttcaacagcgaggtgtcactttccggatgagttcgcggcacaccgcttaaaaacggcttaaacactccgatatccgcctgtttctgccggaatgccgcggcaagtccgcaagaaacgatggtttttccgacgccggtatctgttcctgtaacaaaaaaacttctcatttgtttatattcagctcttttctaatggaatcaaatgcttctgtcagctcgtctatgtcctgtaagctgcgatccgccgtaacggtcagcctgattctgctttcgccttccggaacagcgggcgggcggatggccggggcgcagattccctttttctccagcagtgcagcggctgaaaccgctgtttttgcatcaccgatgataacggggataatcggtgtatctccgcctcttacggtaaagcccatatcggccagacgcgtttttatcattttgacagacgactgcagctcacggcgcgtatcgtgcatatctgatatgatgtcaaatgccgtatgcgaagccgcacaaattgacggcgggagggccgtctgaaaaataaacgtccgcgcctgattcagcaaaaaatcaatgaaaatgtttgatcccgcggcaaaaccgccttccgttcctacagctttgcttaatgtgccgatgacaacatcaggacaaacaccgaaatagtcacttgttcccccgccgttttccccgagtacaccggttgcatgcgcgtcatctgctatcacaaatgcctggtactgctttgcaagcgccattatgcggtcaagaggcgcgatggtgccgtccatgctgaagacgccgtctgtgacgatgaagcggcggttccgagcctggacggaggcaagttttttctcaagatcagccatatcaatatggcggtacacgatggtttccgcttttgataaacggcagccgtcaacaatgctcgcatggttcagttgatcgcttaaaatgacatcgcctttttgaggcagtgaggcaagcacgccgatattcgccaagtaaccgcttgaaaacaataaagccgcttccgtctgtttaaagtccgcgattgtttgttcaagtttttcgtgccacacagtatttcctgtcgttaaccgtgagccgccgcttcccgctccgaaccggctcaacgccgtttgcgcggctgtgatcagccgctcatcttttgacaggcgtaaatagtcattggatgcccaggtctgccgcttttgccctttggttttgagagcggttccctgtgttcgcagcgtccgatacagcccgtctcttttcaccgcatcgagccttccgaggagccatccgtcaaaatccacggccggtcacctcggctatcgcttctttcataatggagatcatggcttgtaactgatcggttgtgctggcaagcggcggcagaaaggcgatgacgtctccgagcggccgtgtcagcataccaagctctctcattttcaaggacaccttgtatcccatccgcttttcaggcggataaggctgttttgtccccttatcctgcacaagctctatgccgcacatgaaaccgagctggcggacatcgccgacatgagggagctgcttcagatcatgaagaaattccgctgccgtttttgatttttcggcgacttgttcaacgatgcgctctgattcgaataaacgcagattttcaattgccgcggcacagccaatctgatttcctgtataggaatggccgtggaaaaatgttttcattttgtcgtagtcatcgtagaaggcttcataaatggcttctgtggcaaacgtcacagcaatcggcaaatagcctcccgtaatgcctttccctgccgccatcaagtccggctggacattttcatgctcacaggcaaacatttttccggtgcggccgaaccccgtcgccacttcgtcaacgatcattaacacatcatatgccgtacacagctttcgtacgcctgccagaaagccttcaggcatgacgatcatcccggatgcgccttgcaccatcgattcgatcgtaagtgcggcaatctcttcgtgatgctttgcaagcagctgttcgagcgcgagaaggcattcatcccggcactgtacggggtcaccgctttcagatctgtatacatacggaatcggggctttgtagctttcaaacatcagcgggccgtacacatggtggaagagttcaatggagccgacgctgacggctccgatcgtatcgccgtgatagccgttctgcatagaaataaacgtctgtttctcgggtctccctatgtttttccagtattgaaaggccattttcagagcgatttccattgcttccgctccgctgtcggagtaaaaaacgcgtgtcagcttttccggtgtgatgtctgtcagcatctcggcaagttctgttgcgggaacgttcgtcatacccagtaaggtcgaatgagcgattttttcaagctgtttttgaatcgcttcatccatttcttttttgcggtggccgtgtacattgagccatactgaagaaaagccgtcataatattctttgccgctgatgtctttcagcatgatcccgtttccgctttcaatgattaacggatcttcatcgtaatctttcatttgtgtgaaaggcagccaaagatgctttttgcttttttcaatcattgattgtttcatatgttctcctcccgctgaatgaatacaggctgcttctccaaaaaatggatacagctctccgtatctatggagccatctgtaaagaaaatccggcatccgctttcatctccggcattcttcatcttggcaatccgctgatatcccagcttctttgcggcaacgtagcctgttatgtaatcagggtcatccgaccagcacaattcagcaataatccccggatgtgcgcaaacttttgccgcgatggcatgtgcttcttttattcgtgaatgttccggcatgttgtgagtaaaagcccatttttgaaaatcatgtgacggccaatccattcgggatacccgcacacctctatttcctctgccgtcaatgcgttctcctgcccggatatcaaacaggaccgctcctcttgcttctgcatattccgcaatgttttcgtacgctttctctatcatgtgcgggggaatccccgccttttgcagaagcttgcgggcgattgcttgtccttttttcggcgtgtctgattgatggaaagcaaccggcaaaggggggatcgtttcgatcggttcattaatgctttcaagctgaatctgcataaaatcaggtatccctcttgagtgcgagaagcctttatgtaataagccatctactgcttcctgtaaaccgctgtaagtgatgagccgttctccgccggaaatgtgttttccgccctgctcatggggggcgtttcgggaagctctcattcttacgctgtaataggtttcttcccgcatatattcccctcctttctcttactttgaaaattaatgttaactaaaatgattaaaggttaacacttatacagaatattagtgtccctcgcggaatatgtcaacctaaaatacaaaaatgttaacttaatgagttttgcaaagccccattacgttttcatgttttgttcatattttagtaattgtttattcaacactgtccgctaaagtaatccatatcaacaaataggacagcgaaccgcatcttattatgaggggaggtcaccgttatgctgaaagaaaaagtaaagacagcaggccgtttttgcactgtaggcgtcggtaatacgctgatcgattttggtgtcttctttcttctcgccgcttgtcatgtcccctatcttccggcgcagatctgctcctattcggcagggatcatcaacagctatgtatggaaccggaagtggacgtttcgtgtaaaacgcaaggctgacgggaaagagatcatgcgatttctcatgattaatcttgccgcgtcgggaatcacctttttgctgctttacgcgtttcaaaaaggcggctgttcgctattggtgagtaagttcgccgccactatcggcggaatgatgatgaattttatcggaaaccgaatatgggtatttggagattcgctgaaaaacatacaggatcaggagtgaagatgaatgagaaaagtgagaaaagcggtcattcccgcagcaggtttaggaacgagatttctgccggcgacaaaggcgcagccgaaagaaatgatgccgattgtcgacaaaccggccatccaatatattgtcgaagaggccgcagcgtcaggaattgaagatatattgattattacagggagaaacaaacgctcgattgaagatcattttgaccggtcggcggaattggaattcaatctgcaggaaaaaggcaagacggagacgctgaaggaaatgcagcggattgccgatttggccaatattcattacatccgtcagaaagaaccgctcggattaggacatgcggtgctgtgtgcgaagcattttatcggagatgagccttttgccgttctattaggtgatgatattatggtatctgacactcccgctctttcacagctcatcgacgtctataaccaacacggcacagaaacgatcggcgtacagcccgtcgatcctgctgatgtcagcaaatatggtattatacagacggggcggcagagcggtcatgtgtacgaggttgaggatctgattgagaagccggctgttgaaaaggcgccctctcatattgccgtgatgggccgctacatattaacccctgctatttttaaaacgctgaagacggtcggaagaggcgcgggcaacgaaatccaattgacagacgcgctgcgcgaagtgtgccgcacccgaagcatttacgcgcgggagcttgaaggaagccggtttgatataggagataagttcggctgttttaaggccggcacggagatcgggcttctgcgggaagaaatgagaccgaaacttttagcttatttagaagaggtgttaaaaagagaatctgaagaaatcgtgcgttaaaaaataatttgtaaccattttgcttgtcaatcagtcatataattgggtaaaaagataaagaggttgtgaacagtgtgggcaattttattagtgaaatattatcctggctgacaagtatgggctatttagggattgcgctcggattaatgatcgaaatcattccgagtgaaatcgttctggcttacggaggctatatggtgtcagaaggcacgatcagctttatcggcgccattgtcgccggtgtgatcggggggacgatcgcgcagtgctttatttactggatcgcccgttatgggggacggccgtttttggacaagtacggcaagtacttacttctgaaaaagcatcatgttgatgttgcggaaaactggtttcgccgttacggcgccggcgttgtgttctcggcgcggtttatcccggtcgtcagacatgcgatctccatcccggccggccttgcgaaaatgcctctttccaagtttgtcatattgacgacgcttgccattattccgtggtctgtcattttcgtttatctcgggtatcagctcgggggacagtggaaagacgtagacagctatgccggaatgtatacaactccgatcattatattggctctcgtatttattgttgtttatttcgttgtgaagaaaatgagatcaagactgtgaaaaaagactgcataagaacggctgcgagccggatctatgcagtcttttttttatttaaaccgggtatacggggtgtttccggtgtgtgaatgtcagttgtttggacatgtaagcagtgaggcgtttattgagttcttcccgcaaggaatcagcaggaacaatgccgtcaatcaccatttcagaggcaagccggtaaaggttaatgtcttccttatattcatcacgcttttcttgaataaaagccggtctttcttcaggggctagcccgctgattttgtttgcgtagaccgcattcaccgctgcttcaggacccattacggcaatttgcgcagtcggaagcgctaaacagcagtccggttcaaaagcaggccccgccatcgcgtataatccggcaccgtaggcttttctgacgataacggaaagcttcggaacagtcgcttccgccattgcggagatcatttttgcgccatgcctgatgatgcccgcctgctcaaccttcgttccgatcatgaatccgggaatgtctgctaaaaatagaagcggaatatggaatgcgtcgcacaaagcgataaattttgcggctttatccgccgaatcgagaaataaaaccccgcctttgacacgcggctgattggcgataatgccgaccggctgtccgtgaatccgcgcaagccccgttattaattcctgcgcaaataacggtttaatctcaaaaaatgagtcttcatcaatgacacgttcaattaaatccatcatgttgaacggtgcgttttgatgtgccgggatgacatctgagagcggtttttcaaaagctttcgggttcttagatttgttgacgggcgctttttcagtataatttgacgggaaatagctgaggtatgtctgcgccatcatgattgcttcctgttccgtccgggcgaggagatcaccgcagcctgatacggaacaatgcatacgggcgccgcccatttcttcaagcgatactttctcgccaattaccatttctgccatacgcggggaacctaagtacatggatgcattgccctcgaccataacgacaatgtcgcaaaaggccggaatgtaagcgccgcccgcagcggaagggccgaacaataaacagatttgcggaatgcggcccgacagctttacttgattataaaagatgcggccggctccccttctgcccgggaacatgtcgacctgatccgtaattctcgcacctgcggaatcgactaagtacaagagcggacactgaagcttttccgccgtctcctgaatgcggatgattttttccaccgttttcgcgccccacgagcccgcctttacggttgagtcgtttgccatcacacaaacggttctgccgccgatggttccgatcccggtaacgaccccgtcagccggaagtccgtctgacatgcactcggcgaaaaaagcgtcttcaacggatatgccgtcatcgaataaaagcttcagcctgtctcttacaaaaagttttcccttcttttcgttgcttgcgtgatatttcgcggctcctcccttttcaatcgttttgctgcgtgtctgccgttctttttcgtaatccatccgagtccctccatgttttattttcctttgtattcagggggtcttttttctttaaaagcgcgcaggccctcttctctgtcaagtgtgggaatgacttgttcatatgcttttcgttcgatttcgagccctgtattgagatctgtctccagacccttgtttatcgcggattttgcttgtctgacggcgatcggcccattagcggcgatgcggccggccagtgcttttgctttttccataagttcatcggcttcacaaacatgctcgatcagcttcatgtctttcccctcttctgcagaaagtcttcggccggtatagatcaattcttttgccgcgccggggccgataagccggggcagtctctgcgttccgcccgctccgggaatgatcgcaagccctgtttcaggaaggccgaggcccgcccggctgacggctgttctgatatcgcaggcgagagcgagttcaaggcctcctccgacagcggttccgttcagcgctgcaatgaccggctgcgggagagcttcaatggattcggccgtttcaccgatacgcctgacgctttgcttaacttgttcatgattcatccccgctctttcttttaaatcagcaccggcgcaaaatgtgttcccggtgccggtgagaatgacacaacgaatggatggcgagtttttgatgtcttcaatcacacgctgtaaatgatcaatcatttctgaagacagcgagttggccgcatgcgggcggttcagcgtgatcagaccgattgtttcttgacagacggaatacaaaacgcaatctcccatggcttctcctttctcatttcgttctgaatgcctgcaggtttctgcttggcaggtctttgcctattttatccgcgatccagccggcggcataaagaagtttattcatgtccgtcccggtatcaatccccatttgttcgagcatataaatgacgtcttctgtggcagcgttgcctgctgatccaggggcgtacgggcagccgccaagcccgcctgaggaagtatcaaaggatgtgatgcccatatcaagagcgggaatgatattcgctagagccgttcctcttgtatcatggaaatggagtgcgatttttgaggcgggaattctcggcaaaagggcttcaagcacggctatgacctgcaaggggtttgccgcgccgatcgtgtcgccgagcgatatttcatcaacacccatttcgagcagggtgtctgaaaggcggatgacttgttcgaccggcacgttctgttcgtacggacagccgaacacagtggacagataagctctcgtcgccattttttcagcttttgcttcagtaataacccgcctgagctcttgaacggtccggtcaatcggtttgtttacgtttttttggttatgggtttcgcttgcagataaaaatacacatgcctgatcgattccgccttctgccgcatgctccagtccgatgaggttcggaacgagagccgcgtagaccgtatgttcagttctggcaatgccttttgcgacgtccaggctgtcacgaagagccggaatccatctcggatgcacgaaagatgtcacttcgatatagggaaggcctgtttttgacagcatattgatccactcaatcttatcttctgtatccacccacgccgattcattctgcaagccgtcacgcggtcctacttcattgatgcggacatgtttcggacagttcatgctgcacctcccgttttattgaagttcaatcaggacctctccttcatcagtgaaatcaccttctgattttttcacttctttcaccgtacccgctgcatcagcgataatcggaatttccattttcatagattccaagatggccacttcctgtccttcttcaatgacatcacccggcttcacatgaattttccacaggtttcccgccatttgaatttttatgacgctcatttggatgccccctcgttcattgtttgtaaaaaaccggttgttgcctcgcccttttcaaacacttctgaatgagcaatttttgtcagcagcggaatgttggttttaatcccttctacatgatattcgccaagggcggttttcagttgttcaatggcttgttttctcgtattcgccgtgacgaccattttggcaatcatcggatcgtaaaacggagaaatgacgcttcccttttcgacggcgcattcgtgtcgcactgacgggtgtcttaaaacggaaaaagacgagatggtaccgggagacgggtaaaaggtgaccggatcttccgcatagatccgcacttcaatcgcatgaccgcggtggttgatatctttctgcgagaaaggcagcgcctgcccagcggcaattttcagctgttcttccacaagatccagtcctgtaatttcttctgtcaccggatgctccacctgcagtctggtgttcatctctaaaaaatagatttgtttcttttcgtcgacgagaaattctattgtgcctgcattttggtagccgatcgattttgcggctttaacggcggtttcaccgagtctttgtcttaattcatcgtcaacaaacggcgacggcgcttcttctatcactttttggtggcgcctttggactgaacagtcacgttcaaacagatgaacgatgttgccgaaagaatctgcgagtatctgaatttcaatatgacgggcattttcaatgaccttttccatgtacattgcgccgtctccaaaaaaggaggcggcccgcttttgattgccttcaaacgctttggccagctcttcttctgaatgtacgatctgcatgccgattccgcctcctcctgcggacgctttcagcatgaccggaaaaccgatggcacgggcttcggctaaggcggagtgaacatcgggcaatggctctgaaacaccgggaacgatcgggacctttgctttttgcatcgtttttcgggcttcaatcttgctgcccatcttggcgatgatatcaccgggcggaccgataaatgtgatttgttcttttcggcaacgttcggcgaacaggctgttttctgacagaagcccgtagcccggatgaatggcgtccgctccggccgatttggcggcttctatgattctgtcgatatgtaaatagctttcatttactctcgatttaccgatcggataggcctcatcagccgcttttacctgcagcgcgtcccggtcggcttctgaatacacagctgccgaggggatgccgagacgtttgcaggtgcggataattcgtaaggcgatttctcctctgttggcaatcaggacttttttaaacaaatgtgaagcactcctttttcattaagttaacttgagctcttcaatcgttttttcccgcagcttgaatttctgaatttttcctgaggctgtcattggatattcatctgtaaacaaaacgtacctggggactttatagcgggcgatatgttctttgcaaaaggttctgatgtcttctgcggaagcggtttgtccgtctttgagcctgacccacgccgcggcctcttctccgtatttcggatcaggaacgccgacgacctgaacgtctgctaccgcgggatgccgatataacatttcctcaatctcgcgcggatagatattttcgccgcccctgatcagcatgtctttcagacggcccgtgattttgcagtacccgtcctcgtccatgaccgccaaatcaccggtatgcagccagccgtctttgtctatcgcttcttcggtcgcttcttgatttttataatagcctttcatgacatgatatccgcgggtgcagagctctccttgttcgccccgggcggcttctccggatgttccgggccgaacgattctgacttcgatatgaggaagcgcgcgccccgctgtttccactcttctttcaaatgaatcatccgttcttgtctgcgtaataacaggtgatgcttcggtctgtccgtaggcaatggtaatgtcggtcatccccattttgccgatcacttctctcatgacttccgccgggcatggcgagcctgccataatcccggttcggacgtgggaaagatcatattcagaaaaacggctgtcatttaggagggcgataaacatcgtcggtacaccgtgcagagccgtacaggcttcttgctccaccgttttcagaacggccggcggagaaaactgttcgatcggaatcatcgccgcacccgcggaaacacatgccagcacgccgagcacgcacccgaagcagtggaaaaacggcacgggaatacataaacggtcacatgaagtaagcttcatgcattctgcgatattggccgcgttatttacgatattaaaatgtgagagcatgacgcctttcggaaatccggtcgtacctgatgtatattgcatatgaatgcaatcatcctttttcaggctgtccatccttccgtcaagcgctgcatccgttacagcttcggcattatccagcaatgaatcccaacggtgcatcccgggcgggcttttatcaccgatatataacaccgtccgtaaaaatggataacgtttcgaacgcagcctgccgcgctcacaagttttcagctccggaatcagcttattcacgatttcaacataagatgtctgccggtaggaatccatgattatcaaggccgagacgtctgaatgtgccagcaggtaatcgagctctgcgatttgaaaattggtattaatggtgaccagaacggcgccgattttcgctgttgcaaattgcgccgcgagccattccggaatgttggatgcccatatggccacatgatctcctttttcaactcccagcttcatcagcccttttgcggtttgccggcataaccggtcaaactcggcatacgtataacgaaggccgcgctcagggtaaacaaccgcttcacgatccggaaaaagctccgcggtccgctcaagcagctttccggctgttaaatggataagttcagccatatgacctgccccccttccatccctgtcttagtaaacgttttcatttcacttcaaaagctgtcttgcgatgaccattctttgaatttctgacgtcccttcgccaatctccatcagctttgcgtcacgaagcatacgttcgacaccgcattccttcatataaccgtaaccgccatgaatttggatggcctgaaggcacgttctgacggccatttcagaagcatagagcttggcgaatgcagcttctttcgtaaatggcaggttttgatccttcagccatgccgctttaagcaccatctgtctggcaaggtcaatttccatcgccatatcggccagcttaaattgaatggcttgaaatgacgatatcggactgccgaactgcttgcgttccttcgcatatgacagcgacgcctccagtgcgccttgagcgataccgacagccagtgccgcaatcgagatccgcccgccgtctaatgtatataaaaattgtttaaaacctttttccggatcaccgagcaggttatcggcaggcaccctgacatcctccagcacaagctcggccgtatccgaccctctcacacccatcttgtcgtacggatttgtgatcgtaaatcccggtgtgtctgtcgggacgatgagagctgaaatgatcggttttccggcggagttctttcccgtaacggcggtgacaatgaccgtgcgggcgtaatttgcgtttgtgatccagcatttctctccgtttatcacatagtcatcgccctttttctcggcttttgtctgggttccgccggcatcggaacctgcattcggctccgtcagtccgaatgatccgagcgcttttcccgaagcaagcggaataagatgttcttgcttttgctgttcagtaccgaaatagtataatgggcttgcaccgagtgacacggccgccgcgtagctcagccccgtgctgccgcaggcttttccgatttcttcgaccgctgctgcatatgaaatggtgtcaccgcccgccccgccgtattcttccggaaacggaattccgagcagcccgagttcgctcatttttttaaatgtgtctatcgggaagacggctgattgatcaacctcatgggctttcggggcaatttcatttttggcgaaatctctgaccatttcgcgcaccatctgctgttcttttgtcagttgaaaattcattaaccttcctccttctgctgctttctacattttattaatgggggtctttattcattccatccaaatgaagtctgaacattcggactcatctgccgccaaaaaaactgacagcgccgcaactgtcagttttattaataatgctatttaaccgtccgttttgcggagggacggctctcatggtgaagcctgtcaacggaagtaacgaaataggtgcaggcttctttcgcccgaatatcagtatctgaaaatgtctgcgtccgtgacgatgtttttctgactgtatccactaaataaggctgctttcccttttctgcgcggtaaatggcgtaataagccgtttttttaccgttggatttcgcatcttcgatatagagtgtatggcctgaagcgttcttctccgcccgtttgacagccggtttttttaaagcggaatgtccgagccaaggcatctcaggaattaatgcgggccggctgtacatgtctttgatcaaacggttttttacatcgagcggattacggtttaaatcctttaaactgaaatgcatgctgccttttatccatgctgatcccctgttaagagcaatctgtcttccgtattcccccgggtcggcccaggccggatcagcgttgttgttgattttataagctgcctgcccgatatataaatgcaccggccgattgttcacttcttttccccaccaatccgctaagacgtcatatgccgccgctttaaatccgatgctccagtaaatttgcggtgcgatgtaatcaatgtatcctttttggatccattctctcgtatcagcatataaatcatcgtagttccgcaccccggcggccgtttcggagcctgtcgggtcatctgcggcatttctccatacgccgaacgggctgattccgaatttgacataaggtttttctcgtttgatggtttggttgatttcttttacaagccggttgacgttatcccggcgccagtcatcaattgatgcaaagtgagcttttccgtaccgttcgtattccgcctgatcggggaattcctgtccggcaattttataaggataaaaataatcatccatatgaaccgcatcaatgtcataacggctgaccacctctttgattccatccgttataaattgtcttacttccggaatgcccggattatagtacagctgttttccgtatgcagcgacccagtccggatgcgaacgcgcgggatgatcatctgaaagcgcattcaaatttgtgtgattcatcgtgatccggtaaggattgaaccaagcgtgaaattcaagattccgtttatgtgtctcttcaactaaaaaagcaagcggatcgtagccgggatttttgccttgtgttcctgtcagatactctgaccaaggcccgtaatctgatggataaaaagcatcagccgcaggcttaatttggacgataacggcgttcattcccatctcctgaacgtcatccagcagcttgctgtattctcttttttgctcttccggtgacagcccttttttagagggccagtcgatattggtgacagacgcgatccatacggctctcatttctctctccggctgagtgccgcttgcttgtgcggatgctgagaacgtaaagatgccggctgtcagtacaacggcaaaaaaccatatcatgctaaaacagcagcttttcatgtttttccccctctctgctttacggtattccgaagcattccgggcggtgaatcagaaagcctgctttgctcctctcagcctaaaagggaaagaaaaaagtcctaaagcgaatcaaaacgcttcaggactttttatgtttcatggcggcgagcacgtcaatgaccttcgttccgacgccgacacacgtttcaagaatggcctgcgctccggcgatggacaaaatgaaaataaccggatgtgcatagcggggccagaccaagtagcagataccgatcaatatggcgcaccagacgcccgcacaccaataacattgcagcatataaccgaatgcggaggaagggacttttttttggacggcgcgcccgttttgatcgacggttttttcttgctttataaagggttttcttatgaattccgtaatcttatcaaatacgatcaaatgggtcagccggtagctggcaagaataatcattacatacgtaagccaagataggttcgtcatctcaaagcctccaaaaaactggtttgattcccctatcttgccctctgtcatcctgaaccattctgccggatgttacagattccgcgccaagcgtcttccgctgtttgcaatgatgtccagtatgacctcagcattttgctgtgcaaaggcgggttcaaacatatctttatgggcgccctcgccttgatattcctgatagagtcccgttgtggcgccttcccatttcatcggctcggtcttatcactgtgctcttcctttataccggcctcgataaaatggaggtttgccgcgatttggccgtcatttatcagttccgcccagtacgtttgatagcgctctgtctttttgatgaccgcttctctgacggcttccgggacattttcggctgttgcgtttgttggctgcggcggcagtgcgtcaagctttctgtacgcgtctgcgataatgacgtcgctgatttctaagccgcgcttttccatcgcttttgccgcctcgaatgccgtattgccgcctgccgaatatccgaagagtatataagggccttccggctggatttccagcattttatcaatgtattgttccattctgctgtcttcttcaataaagttaaaaccgtacacagcagcccgttcgtttaatgccgccgcaagatctttaaagaaaatcccgaaacctgagataggcggaaaacagaataggttgcggcctttcggctggttcagtctgctgatatgctgctctgcagcttctgtcagtgtgtttgaatacagcttttcagccaattgttcaattgtcggatattcaaatatcatttcaatcggcacatccatctgctgcctggtcttcagctgatgaatcacttgcaatgctttcaaagaatggccgcccagctcaaagaagtcatcctgtatgcccagctccctgcagccgaggatcggcgtccaaatgtcgatcagctcacgctctacccagtttcgtggcggaacggcttttgatgacgtttttttccgttctggcgcaggcagcccgcggcggtccactttgccgtttgcggtaagcggcatacggtcaagcttcatcacatactttggaatcatatagtcgggaagcgacctggccaacagggatcgaatggctctttcttcaacatgtgcgcctgtataatacgcacaaaggattgcttcttgtccttcgtctgacacgatgactgccgcttccctgattccatcaatttcagtcaagcgcgcttcgatttcggccggctcaatccgcttcccgcgaatcttgaattggcggtcgatacggctgatgtatccgatgcttccatcaggcagccagtgtgccaagtcgcctgttttgtagatcttttcttcaggatgaaccgggtggctgacaaacgcttcacttgttaagtcaggcctgtttaaatagcctttggcaaccccgtcaccgccgacacaaagctcaccgggcacgccgatcggcgcaagtccgccatttttatcaatgatatacgcggttgaattgctgatcggttttccgattgggatcggctgagaaaaatcgtgcctgatttcgtaaaaggtagaaaatgtcgtattttccgtcggtccgtatatgttataaaggctgagattcggacagcggtgtctgaccttattgatgagcgccggggacaatgcttctccgccgacatataaggtgtgcaacccagaaaacatctccggatctgcctgggcgaactggttaaagagcgccgtcgtcaaaaacagaatcgtaatccggttggaagaaagataattgccgaacctctcaggggcaagcattgtcgagcggtcaaccacatgaagacatgctccgttcaaaagtgctccgaagatttcaaacgtcactgcgtcaaaaccgatggaccctgtcagaatgagacggtccgacatgccagccgacgtgtaattgctgtttgacacgagcgatacgacgtttcggttggaaatcatcacgcccttcggttttcctgttgaaccggatgtatacataatataggcaaggtcatcaggtgctgtatcggtattcagttttcccgcatcaggtgtttgtttttcagctgcagccgggatagagatgatgtgagaaaagtcaatgtcagtctcaattcctttttgcaccgttaacagctgtgctccgctctcagtgagcatatcggcgatcctgtcggttggcagttctgcatcaagaggaaggtacgtccctcccgctttcaatacagcgagaacagcgatgataaattccggtgagcgttcggccagaatcccggcaattccctttggcgccaaaccgttttccagcagggtgcgggcgaatgcagttgaccgttcatcgagctcccggtacgtcatcgtcagcccgccggcgtgaagcgcctgatggtccggggttttcttcacctgtcggctgaacaggctgatgatgctttcatctctttcataagttgttttcgtgtcattaaattcgccgattattcttgatttttccttttgtccgagcatcggaagccgatcagccggaaaatcgggattgaaggcggcgccgcgcagagcttcttccaagtgtccttttacgctctctatccatacttcgtcataaacgttcgcattgtagctgaatttgatgagcagctcatcgccaggcgctatgatgaggttaaaatcgtaacccgattgttccgaaacgttgacattcccgatccggaacggtgcatccgattccttttccgcgtctttcatctgctgctgaatcggataattttcaaacacgatgatatggtcaattaaatcctgtttcagctcagtctgcgattggatgtcagcaagcggatgatagctgaacgcctctgaatcaagcatttctttctgcaagcggcccagcagttctctaaagctttcgtcacccgttttaatgcgtaccggaacggtattgataaacagcccgatcatgctttccacgccgtcaatgacggaaggccgccctgatacgacggcgccgaatacggcatcatccgtccggttgtagcgctgcagcatcaggccccatacagtctgcataagaaccgcgagcgtagcgccctcttctttggcgatggttttcagcttgtccgtcaggttttgatctatagaaaacagcagctcttccttgcggtagcctttttcctggggacgggccgatattttcgggagtcctgagggtgtctcgcagcctgctaaatatcctttccaatactcagaagccgcgtctttgtcctgatccgtcagccatgtaatataagagctgtaaggctttgcgggcgccagtgtgacaggtgagcctgattcaatcgcccggtacatatgcatgaattcctgaaggacgatgccgaggcaccagccgtccataaggatgtgatggtggctccagacgcatacatatttttcgtcagccgttttaaacaaagaaacacgcatcagcatatccttttgcaagtcaaagccttttaagcggtcacgttccttaaatcgctgtaaatagatgctctgttccgcttcgtccaaatgtgtaagatcttcgcggtgcagccggaattcccgctcacgcagcacaacttggcgggggccgttcagctgagcgacatgaggtaaaaaaaccgttctgaaaatatcgtggcggctgatgacagactgtacgctttgctcaaacaattccggacgaagccggccttttatggtgaagacggattgttcgatatatgcagccccctccttttgcagaaaggaatgaaaaagcattccttcctgcattcggctgaggggataaatattttggatattttttgttttgtccatgtgttcctcccgctcggtttagtggaagctgagtaagtcggcaatatcctgcaatgcttcctcagtcagctcccgatcatcaaagtcactgacggtcttctccgtaccggttttgccgaggcagtgttccgacagtttcaggagataataccggcagctttcggacagccgttcgatcgtatcttgccggaagcgctccgtttcataggaaatgctgacggtcatccggccttttgccgcaatcgcgctgatttcaagtgactgctcccgtttccatgtatctgtcacatcatctccgcctcccaaaggagaaaactgaaacgcgtcaggctgttccgtttctgccgggttcccgccgggcgcatcgaattgtccgagataattaaagctgatctccggtgctttcccgaaagtcatcccggcaagcttcggcggtgttaaatatttgaggacgccgtatccgttccctttatccggaatgcgccgcaatgtgtctttgacggttttcaatgtgcgaatttcatattcttcaagaggttcataaactccgctccggaaaagcaccgggtaaatggaagtgaaccaccccactgtcctgctgatgtccgcacctgcctgctccgattggcgtccgtgtccttcaagggcgattttcaaagcgtgccgcggcgaccacttttgaatggcaagcacggcggaagccaaaagcacatcttgcgtatccgtattgtaggcgctgtgtacatctttcaacagggcgtccgtttcactttctgtcagagtgaaggataccgtgttccgtttttttgcaggagtttgagataaatctgcctgttcgtaaggaagactttctgtttcatagtgttcaatctcccgccaatactccgcctgctgaagaagctgtttactttccgcataatcggccagctgctccgtatatgttttgaatgacatggttttcggagggagtttgatttcctgtccagagatggcctgttcataagcagaagccaagtcttccaataaaatccgccatgatatcccgtcgacagcgagatgatggaccgtcagaaacaagtaatcttctgcttcagagcggaacagccccgcctgtaccagcggcccgttctctaaatccatgtttctctgaagctctgcgacgcggcgttttacaaaacgttccttctcatgctcatcgccttccatttctaatatggtcaggctgtaaagctgttcatctgcgaggtcagccggtctgttgaagaggagaagacctttctcttcgtcttttatgcagacaaggcgcaaggcatcatgatgtacggtaatggcttttaacgttttcctcagagcctcttcatctattgaatttgctctcgtcagcatgacggactggttaaaatgatttgcttccttcatgtcttgtgtgaagaaccatttgtgaatcggcgaccacttcacttctccttctgcaggagcttggctgaccggctgccgctctgtacggacataaggcgccagctccctaattgtcggccggctgaaaatatcttttacggcgatctgttttcctgcctgatgtaatcgggctgatacttgcagggctttgatggaatcgccgcccagttcaaaaaatgattgatccgcggcaatgttttcagttccgagcacttcgctccaaatcgcggacagctctttttccatgtcgctttcaggctcggtaaatgcctgtccggtgtgcgcttttttccgcggctcaggaagcgcgcggcggtcaagcttcccgttcggtgtgacaggcagtgcttcaagtgtttcaaagaacgccggcaccatataagcgggcatttcatttctgagcgcctgctgcacggtttcactttctgttccttcttctgtcacgatataagcgcatagttccgtttggcctgctgatgcggtatgagcggtgacggctgcttctttgacaccttttatgcctgttaaggcggattcaatttctttcagttccacccggtagcctctgattttgacttgctcgtccattcggccgatatattgcagcgtgccgtccggcagccattttgccagatcacccgtgcggtacatgcgccggttcttccggaacgggtcttggacaaaggcttgagccgtttgctgaggaagattgcggtaccctcttgcaagaccggaacccgagatgcaaagttctcccgttacaccgatcggctgcggatgatctccgtttaaaatataaacgtgtgaatgctcaatcggacggccgatcgtaatgttctcactttgttctatatgtcttgccgctgtagtggcgacgctgttttccgtcgggccgtactcattggcaagctccgtgtgtggacaaactgataaactgcggctgataatgttttggtcgacagcttctcccgctaatgtgacaattctgagagactctgcatcccccggctccagtacgtcaagcagtgtacggtacagtacgggaacaatgatcatgtgagtgatgcggtaagatgcaagatagtgtttaatagcaagaatatctcttgcttcatcttcggctaaaacggccgctttcgcaccggaaatcagcggtgtgaacatgcttgttacaaacccgtcaaaggaaaatgaaaagagctgaagaatcgtatctttctcattcagatcataaaatccgctccgccattgaagggtttggctgacggatcgatgttcgaccataacccctttcggcctgcctgtcgttcccgatgtataaatgatgtaagccaaatcttccggtgctgataatgactggaccggcgaagcatcctgttcttggatatcctccagtgcgagcacttcaccgttaaaacgatcaggcacttgttctatcgcaccgtgtgcggtaaggagaagcgctgtgccgctgtccgagatgatatattgcttgcgttcctccggatattcaggatctatcgggacgtaggctcctccggctttccaaaccccgaagactgccgctacttgttccggcgatcttggtatcacaatgccgacggctgcatcaggtccgatctgccgtttttgcagggctctggcgattttattcgaccagtcatctaattctttgtatgtgatcaatgtttccccgctgataagggccgcggcatcaggtgtttttcgcgcctgggtgatgaacagttcatgaactgttttttcaggcaactgttgatccgtcatgccgttaaagtctgaaagaatccggttccgttccggagcagtcagcatgctgatcgcttgtaaagaagtttccggttcacggacaatgtgttcaagcatcgtcataaagtgggaagcccagcgctgcattgtttctctccggaataaagacgccgcatattcaaacagaaaatgaatctgtcctttgccttcagaagcctgcagagtgacatcaaatttggaaaccggacgggacacgtccgcaggctgaatatgcaaaccgtccaacagcagttcctcatgctctatattctggacgacaagcatggcgtcaaacagcggattgcggcttgtgtcccgctgcacaccgagccgttccacaagctcttcaaacggatagtcctgatgctcatatgcctcaagcgccgcctggcggacttctgccaagtaatcggtgaaccgtttgtctcctttcggctccgttctgatggccagcgtgttgacgaacatgccgagaatcggttctaggtctttgtgcggacgcccggcaatcggcgagccgacgatgatgtcttcctgcccgctcaatcgcgcgagtaacgtattgtacgcggcgagaagcaccatatacaaagtggagccgtgatcccgggcgatgcggtgaaggccggatgccgtttcagcgtcaagcgtgcacgatacgctgccgcccgcaaagcttctgaccgccggacggggcttgtcagccggaagctcaagcaccggaagctctccttcaagccgcttcagccaatacgcttcctgcttctggtacccttctttctcctgaaacgaccgctgccagacggcatagtctttatattgaaggcgcatcggcgcaagcgaacggcctgcgtacagctcgccgaattcttttatcaaggtgttgacggacacaccgtcagaaataatatgatgcatatccgttaataaaagatgacgttcgtccgattctttcacgagggccgcacggaagagcggcgcttcttccagacaaaacggccggacgaatgcgtcagctgactcggcctcatccagctgaaacggcacgctgtcatggatgcgctgcaccggttcgccgtcaggccccgtttcaaaggacgttctgagcgactcatgccgcttaacaagctgccggaacgtctcctccagccggccgcggtcaagcgggcccgtcagttccagcacagccggcatattgtagccgacaccgccgtcttcaagctgctggagcacatacatccgtttctgcgccgaagacaccgggtaggtgtcctgtgtttgcgcaggctgaatcgcttcatacgggctctcttccaagtcctgaataaccgaagcgagctcttccaccgtcggccgggcgaagatgtcctgtaacggcacctgaacaccgaactctttggcgatgcgggagacgagagccgtcgcttttaacgaatggccgccccgctcaaaaaagtgatcccggatgccgacggggccgtttttcagcacctcttcccaaagggcgcaaagcttcatttccgtgacgttccgcggggcggtgtacgcccgtctgtctgccgctccgccgggagccggcagtgcgcggcggtcaagttttccgctcggcgtgaccggccattcgctcatctttatgaactgagccggcatcatgtaggccggaaggcgtgtcgcaagctccgcccgcacgtcatcgctttcccgtccttcgatataggcgtaaagcgcggtttcgccgtgttcggtccgggcggtgaccgccgcctcacgaatgccgtcgatgcgccggatcgccgcttcgatctctcccggttcaatccggtagccgcggactttcacctgtccgtctgaacgtccgagccattcgactaggccctcttctgtccagcgtgcgatatcgcccgtctgatacatgcgctctcccggataaaacggatcatcgagaaaacgctcctccgtcagctcaggccggttcagatagccccgggccacccctgtccccgcgatgtacagctctccgatacagcccggcggcagaagccgtatcttttgatttaaaatatacagccgcatgttatgcccggaaatgccgatcggaacattgtgaaattcttttccttgcggcaaatcaaagtacgccgcttctactgtcgcttccgtcggaccgtaggaatttgtcaattccgttcccggcagaaggtcataaaaacgggaaaccaggtgcgggcccaattgttcgccgccggcaaaaaccctttttaagcaggtttttttgatcggctgttttctggaatttatatattccaagaaagcatgaagcatggatggcacaaaatgagccgccgttatgcggttattctccaatgcgttcagtatcatttcagggtctttctcgccgccttgcggaaggaggaaaacagaagctcccgcgatcggccaccaaaacagctcccaaatcgaagcgtcgaaagagtatgatgttttatgcaaaatgatgtcagaatcacttaatccataacgcgtttgcagtgagtataaaaagtttacggctgaccgatgttcaacctgcacgccttttgggcgtcccgtagaaccggatgtatagatgatataagccaatgaatcaggttttaccggaacgttagggttggccgcagcttcagggtttcctgtttgtccgcttttcagagagatcgtttctccctcaaaaagatctggtgcggaaagttctggttctgccagtaagaatttcacgccgctgtctttcagtaaaaagcgaatccgctcttccgggtaatccggatcaatcggcagatatgcaccgcctgcttttaagacagcgtaaatgccgatcagcatgtcaggagaacgccggcccataatggcggttttatcctccagccttatcccgcgcttgatcagctgatgcgcaagctcgtttgccctttcgttcagttcctgatacgtaatcgaaatgtcatcagttaaaattgccggacggtccggcgttttttcagcctgatgttccagcagatcatgaagagactgatgaagcggaaacgctgttttctgcaaggggctgaaatcttgaagcaaagacacttcttctttttctgtcaaaacagaaatatcgtctaattccaagcccggatcagccgcggcgttttcgacaagtgtcgtaaaaaatcccgcccatttttgaatcgtttttctcttaaacaaatcggtgctgtattcaaactggcagtataattcaccggcgttttcagagatgtacagtgataagtcaaatttagaaatcggcaggctgacgtctgccggctgcagttcaagtccagctgccctaagcttctgctgttccatattttgcagcgcaaatgttgtgtcaaacagcggatttcgggacatgtcccgcggcacaccgagcttatcgacgagctcttctaacgggtaatcctgatgttcgtaagcctcaagcgctgtttggcgaatttcctttaaatattctttgaatgtcatgcttccgtcgggacgcgtcctgaaagtaagcgtattgacaaacatgcccagaacggcgtcaaggtcggcatgaggccttcctgcaatcggagacccgacaatcatatcttcctgtccgcttaaacgggctaacagaaccgtgtacacaccgagcagcgtcatatacagtgtgcatttgttttctttcgccagctttttcaactgtgctgtatgtttttcattgatgacaaatgacacccggtcaccggaaaagctccgcaccgggggacgcggcttatcagccggcaattcaagcacgggaatctcaccggcaagccgattcagccagtactcctcttgtttccgatatgcggcgcccgccataaatgattgctgccagacagcataatctttgtattgaatccgtaacggcggcagacttctctcagcatacagctcactgaattcacgtatcaaaagattgacggatacgccgtctgaaataatatgatgcatgtcagctaaaagcagatgccggtctttttctatttggacaaatcctgcccggaaaaggggcgctttgccgagatcgaacggccggataaacgcttcggctgattgttcttttgtaaatgcaaacggcacgtcgtcatgaatcctctgcacaggcaggccgttttgttcttcaaaggacgttctgagcggttcatgccgccggatcagttccttgaacacggcttccatcctatctcggtcaaacgggcccttcacctctaaaacggctggaatgttataactgacaccgccattttcaagctggtgaaggacgtacatccgtttttgggcggatgagacaggatatgtttctttcatttctgtcttttctatggatgcgaacgggttctcttctgcttcactgatgattttggcgagttcttctacagtcggatggctgaagacatcactcagcgggatttgcacactgcactctttagctatttttgcaacgagtgccgtcgcctttaatgaatggccgccaagctcgaaaaagtgatcgtgaacgccgatcggtccggtttgaagcacttcttcccatatgcgggtaagcttcagctcggtcacattccggggagctgtatattgacggcccgctgcgtatgccgaagcttccggaagggcccgctgatcgacttttccgttcgcagtgagcggaattgagtcaacaaaagcccatttgaccggaatcatataatcaggcagctctttagccaaatcacttcgcagctgagaaggatcagtcgcttgtgagacgctgcagtaggcgcataattcattttcgccggactcattcgtttgaatcagaacagcagcttctttcactgcatgatgatttgccaggacggtttcaatttccttcggttcaatccggtaccctctgatcttcacttgatcatctgtccggccgatgtattcaatttggccgtccgcacgcagtcttgccaaatctccggtccggtacatgacggcgtccgttctgaacggatccggcaaaaatttctcttcggtcagcgccggattgttcacatagcctcttcctgtattcgccccagaaatatacaattctcccgcaattccgagaggctgaagctgcctatttttgctgaaaatatacatcttgttatgatggatcggtttcccgatcggcggatgttcaggtatgtcatctcccgcagaaatcgtatacgttgaaaccacatgagtttctgacgggccgtaatgattatgcaggtgcataccgtgtaaacggagcgtctgcctgaacaaacgcgaaacggtcagctgctccccggccgtaatgacatgcttcacacagcggggaaaagactgtgcataaccttcttcattgaaaagcattttgacaaacgcagtcgggaaaaacacaacttccgtgttgtgctgatcaataaacgaaaacagctgagaaacgtctcgtttgattgattcgggcacgatacaaagggtgccgccgctcaagagtactgaaaataactcctgatagcagacgtcaaacgccacagatgcgtactgcagcacatttgtgcaaaaatcaatgtctgtgttcgtcaattggtgagaaagcaggttggccatatttttatgttcgagcagcacacccttcggtttccctgtcgttcccgatgtataaatcatataaaggaggtcgtctgccgtattaatggattgcacattgcttccgtccgcttccgtcccggcctcttctatatatgtaacctgcagcgtttgttccgcggggactgattgatgccgctctgttacaacatggacgcagccgctgttttcaatgacatatcgaatacgctcctttggactgcccggatctatcgggacaaaggcgccgcccgcttttaaaataccgagaacagccgccgctaaagaaggggaacggccgagcatgacgcctaccggttcctcccgctttaatccgcgcttttgcagcaggcgggccagcttattagccgattcgttcagctctttgtacgtcactgactcgccttcataccgaatcgcgatttgatccggcgtttttgcggcctgccgttcaaacatcgcatgaaccgtgtcatattcaggcttttcggtctcttcagaaatcggtgcgagcagctgcgctttttcctctggggttatgatttcaagcttgtccggcgtgatgtccggtttgtcgagaacttgggagacgatatgtgccaaatggcctttgatattttcaataaattggcggtcatacatgcttgaatcgtatctcattttcaaatgaatttcgtcacccggcgccaccataagataaaaactgtaattggtttcgtcttccatgctgaaatcatggatgtgaaaaaggtctttcgtgtcccccttgctgttcagcacatcaagctcctgttcaaccggataattctcaaagacgagaatgtggtcaattaagccttgttttacctgtgaattcgcctgtatgtcataaagcggatgatagctgtatgcctgtcctttcaaagcgttcttttgcacgtttttgatcagcttttgaaacgggatgtttgccccgctgatccggacaggcacggtattaataaacaggccgatcattcgctcgatgccttcgatttcagacggccttccggaaatgacagaaccaaaaaccgcatcttctgtctggttatacgcctgaagcaaaatgccccagagcgtgtggaaaatggtgctcagcgtgacctcttcttttacggccagctctttcagcttagccgtgtcctcttttgaaaaggaaaacgtcacttcctcttgtctgctttcgccggcttttttctgcttcggcagaacagtctgctgctcaaagccttcaaggtaccgctcccagtacgaagcggctttttctttatcttgctccatcagccacttgatgtaggtcccgtacggcacagcgggctcaagcgttaacggtgtccggcggagccgcgaggcgtatatctggaagaactctttcagcacgattccgagacaccagccatccataatgatgtgatggaaactccatatgcacgtatattcacattcaccggtttgaagcagcgtcacccgcatcagcatgtctttttgcagatgaaatcctttcttacggtctcttcgtttggcttcttcaatatgcttgatttgatcagccttgtttaaattggtgagattttcctcaatgatgctgacgttccgctcttttaatacgacctgctgcggcactgacacgttctggctgataaagatcgttctgaaaatatcatgtctttcgaaaagggcatgaacgctctcttcaaacacgcgggtgtcaaccttccccgttattgaaaaggaggcctgctcggcgtaagcctgtgattccttttgcaggagggaatgaaaaagcattccttcctgcatataagacagcggataaatatcctgaattgcattcttttttgtcatgttataatctccccgtcgcctttttctacagttcctcgacaaaactcgctatgctgtccaaatcatcagatgttaacgttttgctgctaaaatcactaacggttttttctgcttcctctttgcctgtgcagtgcgccataatatcacgcaaatattgctgtaaagtttgcagcagctgttccatcgtttctttgcggaagcggctcggcggatagctcaaactgaagtgaagtttgttttgtgcggccatcgcgctcatttccaccgcttgttcccgctgccatgtcggcgtgatgtcgtgcccgcttgcaagaccggacagactgaacgtgtgctgatcttctgtatcattgaattgccctaaatagttaaagctgatttcaggcgcttgtctgaagcggattgttttttgttcaggcggtgtcatgtattttaaaatgccgtagcctattcctttatccggtattcttccgagtgtgtctttgaccgtttttaccgccgttccaagctcagcgcctgctgtgttcaagtcaatgagcaccggatacatggaggtaaaccagcctacggtgcggctgatgtcgagctccggcatgatgtgctctctcccgtgcccttccatcgcgatgcgcagtctgccgccccctgtccagtcccgtaaagccaaagctgcggcagtcagaagaatatcttgcgtatcggtatggtaggcccggttgacctgctgaagcaaaacggacgtttcttcttctgtaagcgtaaagcttaccgtttgccgaatgctgtcggctcccgtctgatgctgcggtttttcataaggaagttcggcagctgtttcttcttcaataaaacgccaatattcttcttcacgcatcagcttgctgctttttgcgtattctgaaagcctttcagcgtattgcttaaacgaatcggtctttggcggaagctggaccggctgaccttttacggcttgagtgtaagcggcagataaatcctccagcaaaatacgccatgacactccgtcaaccgccaggtgatgtacggtgatgaataaataatccccggaccgggttttgaaccagccggcttttaataacgggcctttttcaatatccatccgctgttggagcgcagcgacttcactttctatttctttttcccaagtatctgtctcagacagatcccaaatgtccaagctgtacagttcatctttttgaataccgtgattgatttgtctgaaactttcgttttctgtactgacggtgatccggagtgcatcatgatgaatgacaagatgctgcaaggcttctttgagcggctgtttatgcaatgcgtcagagctgaacatcatgacggactgattgaaatgatttctgttttccatccgctgtgataaaaaccactgctgaacgggtgtccaaggaatgtttccttccaccggccgctgatcgatgactctttccgctttccggataagtggcgcgagctccttaatggacggatgccggaataagtcactcgccgtcattttccacccatagcgtccgagccgtgcggaaacttgcagcgctttgattgagtcgccgcccaattcaaaaaatgagtcctcaatcccgacttgttttgcgccgagcacttcctgccagatcacggaaagctgttcttcgagctcattgcggggagctgtgtacgcggtttgaagcgcgagctccggttcgggcagatttttccgatccaatttaccgttcggcgtaagcggcagcttctcaagttccatcatataggccggaaccatgtaattcggcagttgctgagaaagtgaagaacgcactttttctgtatccatgtccgcctgcagactcatatatgcgatcagttctttattgccggactgcccggttctgactgacacggcggcttctttcacgccgtccaggctcctcagtgcggcttcaatctctcccagctccacccgataaccgcggattttcacttgatcatccatccgcccggcatattcgatcgttccgtccggcagccagcgggctaaatctccggtgcggtacatccgttctccgggaacaaaaggattagggacaaatttttcttccgtcagttcagggcggccgaaatatcctcttgccacaccgtctccgcccgtgcataattcgccgatgacgccgatcggctgcggtgttcccctgctgtttatgatatatgcggttgaatttccgacagggcggccgatcgggattgaatgatcgtatgattgttcaatcaaaaagcaagtcgagaacgtcgtgttttcagtcggtccgtatccattccatactgagagttgcggcagcgcactccgaacccggtttacatggcttggggacagtgcttccccgccgataatcaatcgggataatccggaaaacacgtgttcattttgttctgataaatggttgaacagagacgatgtcagccacagtgtcgtaatgccgttttgctgtataaatgtttccagaacatccgagtcgagataggtttcctggtcacttacatataaagaagcgccgtttaaaagcggaccgaatatttcaaatgtcgtaacgtcaaatcctaatgatgaagtaaacaatagtctgtcttccggcgtaaaatcaatataattgctgtttttcacaaggcggatcacgcttcgctgttcaatcatgacgccttttggcgcacctgttgatccggacgtataaatcatgtaggccaacgattcaggtccgccgagcggttcgggattttctgaactcaagccggcctttgtttgaatatcctctatgaataaacgttttcctgaaagcggcagaccgtcaagtttatcagattggagaagaatatcagctttacagtctttaagcatccattcagcccgttcccgcggcacatcgtcaccaataggcaagtaggcgcctcccgcttttaatattccgaggattccggaggcaagctctgttgtgcggccggttaataaggcgacaacgctttccggaccgacgccatttgatcggagagccgccgctattctgttagcccgttcgttcagctcacggtatgtcaagatttgtccatcatatacaactgcccgggcatcgggggtttcttttgcctgccgctcaaataaacggctgatggtttcgtgtcttgggtaatcgcttttcgtctgattaaactgataaatgacgcgatttgtttcagcattatccagtacgtgaatgtcaccaagcggtatcgcttggttttcaattacttttgtaagaatacgtgtaaaataacaaagccatttttcaattgtctgtttttgatagatatctgtattgaattcaaaatcaaagctgatggaaccgtcagacccttctgacgcgtaaagcgtggcatcaaactttgcggttttatgacttgtatccgcagcttgagccaaatgcagcttatttaacaccagggattcacgctccatattttggagcacaaacataacgtcaaacagcggattgcggctcgtgtcccgctgcacaccgagccgttccaccagctcttcaaacggatagtcctgatgctcgtacgcttcaagcgcggcctggcggacttccgccaagtaatcggtaaaccgtttgtctcctttcggctccgttctgatggcgagcgtgttgacgaacatgccgagaatcggttcaaggtcttcatgcggacgcccggcaatcggcgagccgacgatgatgtcttcctgcccgctcaatcgcgcgagtaacgtattgtacgcggcgagaagcaccatatacaaagtggagccgtgatcccgggcaatgcggtgaaggccggatgccgtttcagcgtcaagcgtgcacgatacgctgccgcccgcaaagcttctgacagccggacggggcttgtcagccggaagttcaagcaccggaagctctccttctagccgcttcagccagtaggcttcctgcttctggtacccttctttctcctgaaacgaccgctgccagacggcatagtctttatattgaaggcgcatcggcgcaagcgaacggcctgcgtacagctcgccgaattctttaatcaaggtgttgacggacacaccgtcagaaataatatgatgcatatccgttaataaaagatgacgttcgtccgattctttcacgagggccgcacggaagagcggcgcttcctccagacaaaacggccggacgaatgcgtcagctgacccggcctcatccagctgaaacggtacgctatcatggatgcgctgcaccggttcgccgtcaggcctcgtttcaaaggacgttctgagcgactcatgccgctccacaagctgccggaacgtctcctccagccggccgcggtcaagcgggcccgtcagttccagcacagccggcatattgtagccgacaccgccgtcttcaagctgctggagcacatacatccgtttctgcgccgaagacaccggataggtgtcctgtttttgcgcaggctgaatcgcttcatacgggctctcttccaagtcctgaataaccgaagcgagctcttccaccgtcggccgggcgaagatgtcctgtaacggcacctgaacaccgaactctttggcgatgcgggagacgagagctgtcgcttttaacgaatggccgccccgctcaaaaaagtgatcccggatgccgacggggccgtttttcagcacctcttcccaaagggcgcaaagcttcatttccgtgacgttccgcggggcggtgtacgcctgtctgtctgccgctccgtcgggagccggcagtgcgcggcggtcaagctttccgctcggtgtgaccggccattcggtcatctttatgaactgagctggcatcatgtaagccggaaggcgtgtcgcaagctccgcccgcacgtcatcgctttcccgtccttcaatataggcgtaaagcgcggtttcgccgtgttcgttccgggcggtgaccgccgcctcacgaatgccgtcgatgcgccggatcgccgcttcgatctctcccggttcaatccggtagccgcggactttcacctgtccgtctgaacgtccgagccattcgactaggccgtcttctgtccagcgtgcgatatcgcccgtctgatacatgcgttctcccgggtaaaacggatcatcgagaaaacgctcctccgtcagctcaggccggttcagatagccccgggccacccctgtccccgcgatgtacagctctcctgccacgcccgcaggctggatggttcctccgctatctaatacatacagacgggcacccggaacgggtttaccaatcggaagccgcgtccgtccgctgtcccgttttcggtcacagacgtaaaacgccgcatccaccgtcgcttccgtcggcccgtagccgtgaataagcacggtctccggcagaagatcggcaaaccgggcagccgtaagcggtgaaagagcttcccctccggcaaacacgcgtgtcagtgttctgccgaggtgtgttcttgtttccgcaggctctgtttccagcgcgtctaaaaagctgttgaccatcgccggaataaaatgcgcggtcgtcaccttttctgaggcaaacgcttcaatcatccgcacaggatctttctcccagccggccggaagcagatacacggaggcgccggacatcgtccaccaaaacaattgccagatggaggcatcgaaagaaaaggatgatttcagcacgataatatcctcttccgttagcgggaactgcccttgcatccctgataaaaaggcggcggcctgacggtgttcaacagccactcccttcggtgttcccgtcgaaccggacgtataaatgatataagcgagcgaatcagcatccgcttcgtcagagacagcccctgtctccgcctcacttgtcagagcagaaagagacacttcaagcgtttctccggaaaaaccggaaacggataatcccggctgtgcaagcaggagacaagcgccgcagtcatcgagcatatagcgcagcctgtcctcaggatactccgggtcaagcggcacgtaggcgccgcccgcttttaacacggcaagcacagaaaccaccatctccggcgagcgttcagcgagcacaccgaccatgctttctttgcggacgcctttttgtcggagccgagcggcgagcctgtctgtgtactggtcaagctcggcgtacgtcagcataccgcccggaaaacggagcgccggacgatgcggcgaaagcgcggcacggcgggtaaacagcccgtgaagcgtcggggccgacggttcagccgtttctgtacggttaaacgcagttaacacccgtttcttttcattttcatccgccatatcaatatgccgaatcagccggtctggatttctaacggcattttcaacgatcgtcagcaaatgagtttgaatgcgtttgattgatttttcagtaaataaagcggattggtaatcaaaattcagctcaatcaatcccgtatctgtccgctccttaattaaaatggacagctcatttgccgtatgcccgctgaaaaacatcgccgtttcataatcgaaaccttctgcctgacgccacgcgagaggctggtattgcatcgaaatcccgatgatattttgcaggtcgtgatgaatctgccttaattcattgacaaaaagattgtaaggatatttctggtgccgcataacagacagctgctcttttcctacgctgcggacaaaggacaggaactccgcatcaggatctgccgtcattctgatcggcagtgtgctgacgaacatgccgagcatatccttttcgagcctggagccccggtttccgtaataagtgccgatggcaatatcctttttagccgtcagacggctgatgcatatgtataacgaagccataaacagagagatgatgctgatattattttctttgcaaaaacgccggatagattgttctaaggagtgagaaagagtgatagtatctctggaagccgcagtgctttgtctaagatgagaggttcgttccgccagtgaaaggtgttccggaacggttcggtatgtttcagtccaaaatgaacggtctttttgaaaacgggaagactgtaagtattgctgttctttttccatgtagctgagataggaaggtctgtgatgttcagttaaatcctcgccccgcatgatcttttggtagatgtcaatgagctggttgccgagcaggttgagcgagatgccgtccatgataatatggtgaaattttgaataaagccaaacttctttgtctgacatgacaagaagagtaaattgatacagaggtgaatgaaacagcttgaacggaacacgagtctgcgtgtcaatccatgcgtcccgctctgcctgatcagtatgagtaaaatcaacagtctctagagaaatcggccgatgccccgccagatacagctggggttctgatccgtccccttctgtcagttgaaacctgagcgaatcattttgcgagatagaaaaatctaaagcctggcgcagtacgtcaaaatcgatgtcccccctgaatttgacgcatgccgcgagattgcagatacttgtgcccggttcgagcagctccgtaaaccacactcttctttgtgcgtgagttaaagaataaacagtgttctccaatggaatccctccgcttcaatttaagaggataagaaagtgaaataattacaattaaatttcgacagcatatgacttaatcatccatataagcattattttaaaacatattttagaaatcacaataaaaaattaaattttctctaacattttttagaatatagtatatattcctcacttcacttcttcatttctataatctttataccatgtaaaacggtatgtatgcatactataaactggttcttaaacactataataaggaataaaatgtataattaattgcgcttttaaaaaggttttcctcccgaaaagaagttttatgttaaaaaatgaataatcggtgaacatgtaagaaagcggtatgtaaaaaaaaggaaggatattgccgatattactttttgaaaagattgattcataatcgcaatataatgttttacagacatcaaaaaaagccgaatcctctaaggattcggcccttcttattgatttgccagcacgactgcgattttgtcttcaatgtcttttccgtcatcttcgtcaagcagcccgttttgaagcacggaaaaaataagcgtatctcctgtttttgtgtctgcatagccggcaatcgaactgactgatgttagtgacccggttttcgctttaattttgccttctgccggagtattcttcagccggttccgaagggttcctcccgtcattctgtcgcttgcaccggcgacagggagcgaacgaaggaaagccgggtaccacttttctttctgaaccgcatacaaaagctctccgatttggccggcggatacgccgttaatatgagaaacgccggatccgtctcttgcaatcaattcatccggattcagcccgaacgatttgagttccgatttcatcacgtccaagcccttttcccagctgccctccccttttttcacttttcccatttccttgatcagaatttcggcgtgtccgttgttgctcagtttcataaacgggatcaataattctgaaagaggcatggatgtccgtgatgtgacgagctgggtgcggtgcggcattcgccctgttctgattttcccttttacagttataccctgtttagtaagcgcttgtttccataaatctaaagcataggacgacggatcccacactgccgcccattctcttgcctgtgccgagccggcaggtatggttccctttatcgtaatcacattgccgccgtgctcccgttcaaccgtcaaatctttcttttcatcagaagcgacggttttcacttcatttttcacacgaacgacgtccgtatggggagaaatcgaaatgcgcggctttttaccgggctgtttcgccgggctgatttccgcaatcaccgttccggtatcataatcctcatttggtgaagcggtaagagctgatacttgcgcgccataatattggccttcatcactccacggaagatcaactgaatacctggtatcgtcataccacgaatcatccccgaccagatctcctttaatgacttggatgcccctggctttgacctgtttagccatcttctcaaaatcagaagccaatagggtcggatcaccttttcccctgagataaaggtttccgcgcagctgttttccttttacggcgccgtctgcccgtacttctgtcttaaaggtataatcttctccgagaacggaaagcgccgcagatgccgtcagcagcttcatcagtgatgcaggcctcagccgcatatcttcccggctgccgaacagcacctcccctgtttttgctgaccggacactgacgcccgctgaagctccctttaaagcaggttcttcatccagaatgtgttccagctctttttgcaaagtatttttttgttcagccgccttagccgcatcatcaatataaggaactgcggcaatgatcaaaagcagaatcaccgcgctcaagcgtttcacatatgttttcaatgttatcccgcctctttcctattcttcgtcatgcaaaatggtgatcctggatgacgaagccgcttcttcgcccggtttcagaatctgaagccctgtcagtgatgcaggctgattcagattaaatgcatctgtaacggaagtataaggctcaagactgacaaacccctgctttccgtcaccgttatataccacccaatgcttgaaagacgtgtctgcttgatacaaaacggataattgctcatccggatgataaataacagcttcattattgccgccattccgtccggaagaaagaaaaacatcgtcaaactgtttatttttcaaagacatcccatgacggaacgcttctttatcaggcacatccaataaacggcccgtcggcacgaaacgttcatttaattcccacatgcggtcagccgtcaaaaatagacgggatcgctcttcattgaaaacaaaagttgaatgatagccgagcccccaaggaaaagcctccgttcccttattcataatcagcgcccgctgcgtaaacacattgtcttttaatgtataggtcatccggacaatgacatcgtgcggaaattgtttatgaacacggggaatctttgaaagatcaatttctgtttcgactttcattccatccccctcttctttcgctgccgccgctttccaatgctgattgtgaagaaagccgtgaatatgattatgtttatcctcttcgtttatctcgaattgatacgcgcggccgtcaaaacgaaacgtcccgtccgtaatccggttcggcgggaataaaacgggaatgccgtacagcatcggttttttgcggaattgctccgcagtttccggttctctcagaagccgcataccggttcttttatcccgaagcgatatgacatttgatccccactccggcacaatgatgcattcagcctgatcagtctccgcttttatggctgaaacccctaaataagtcgtatgttcaatcgtcataagcacctgccctttccttgttttctagcatgtataggaattccattttctaaactcattttccttctctaaaaaaaacatcgcccgtatgaactgagcgatgtgcggtaaaaccttattgaatcaatcgggtaatctgttttttcttccatacaaaccggtaatatccgtattgcagcagcaggctgacgacaaaagccgccggataaccgacccaaatgccgagaatgccgagattcgtataatgagaaagaataaaggccacaggcacttcaattccccaaatcgcaaaaatactgataatcgtcggccataacaccgtaccgctcgcccgcatcgttgctgaaacgatctgagcgtgaccgaaaatcaaataactccaaagggtaatcataatcagattgcgggcaatgtggagcgtgtcctgatctgttaaaaacaaagcaagtatctgccgggagaaggtataaatcagcacaatcaaaaccccgccgatcaaataattcaggccgatgccgactttgatgacctgtttcagccggccgaattgattggcgccaatggattgggcggcaaaaatggaaacggcgataccgaggcttaccgccggcatctgcacataactcgccacttggttgacgaccccgtaagcagccgtcgcgtttgatccgtaatgattgacaaatgaaatgaccgcaatttcagaaagtgacacgagaatcatattgatgctcgacggaataccgagacggagtaaaagcgcgagcagctttttgtccattttaagagaacggagcgcagtccggtcaaatgccaatggatgtttccttttccgcaaataaaccatgagtacgataaatgtcacgatgtttgaaatcacggttgcatacgccgaaccgtaaatgccgaacttcggaagtccgaaaagcccgagaatcaataagggcaagagcccgatgtttatgactgtactgacgattaacgtataaaacggagtctttgaatctcccgttccgcgtaaaaatgtcgtatacgcaaaatataaaaacatcagcggcattgcgcaaaacaaaatgcgcgcatatcggacactgacatctattacgttttccggcgttcccatcagccgcagaatatcaagcgtaaacacactgccgacaactgccagaacaacaccgagcataaaggtaaaagtcagtgtagtgccgacaatcgccttcatcctctcttcgtttttcgcgccgtaagcctgcccgatcagaatggaacttcctgaaccgattccgatcgtaaaggagatcagcagaaaaaacagcggaaaaaaagacgatacagcggcaagcgcatcgactccgagccaccttccgacaaataccattccgaccaattggccgacagattgcaatacattgcttaaaagcagcggcactaaaaacagtgacatcgatcgccagactgactggccgcggccttccgctgtttctaaatgatcttgtacttccatatgtaggactccttttttgattttcttccattttattattcagcagacagcttgtaaaaaccttttgttcaatgaaactctttatctttttctcacgtcttacatggaaataaaccataaaaataaaaagtccggaaaatatttctgaaaaggtattgtaatcttaccgtaattattgtaacatttgtaacataagagaaagagattgattgaaggagagattatatcatgaaaaaatggctattattcctcactactattacattgattctgtcattgggcactgcggcgactgcaaaaaatgcacctaatgaccttacacaaaaacaagcacttcagctggccctgtcagcgagagaacatttctggaatacaatgagcggcggtgcgcttaaatcaaacgcaaattgctcatctgaaccgtttgaatatcaaaatctgcaatatgtatttatgtgcaaagacctcggaacaaaagcgaaagccgtaaaatatctgacacccgcttttacaaagcaagcgattgacaaagggctcaaagattaccacttcactgtaaaagacggcaaattggctgttccggtcggcgacggagataacctcctgaattggaaaaaagcaaaaatgacccttctttctaaaaaaggaagcgtccaaacataccgcttcactgtacccactcttgacggttctctgtcagcaaaacgcgatgttacattcgtaaaagaaaacaacgtttggaaagtcaatcaatttgatgctgtcatataagaaaaagcccgcttgcttacagcgggcttttttcacatcatttccaccaggttttcacaaaatattcaactcaaaacccccttgtataacaagggggtttttgttttaccgacattattaagctgcgcctatctcatacaaaaaacgctctaggagagattcgaactcccgacctgcagtttaggaaactgctgcactatccgctgtgctactagagcctgcttctattatagtaacgctggcggccgtttttttcaagtctacagccctccgaacactttataggcggctctcgtcgtatcttcatctattccgatataacgcattgtaatagacggagaagaatgattcaaaatcctctgcagttcagcaatgtcttttgtcctctgataaaaatgatacccgaacgtctttctaagcgtatgcgtcccgatttcctccaatccgcaagcggcagccgcttcctttaatattctgtatgcctgaatccgggatatgggcttattcgtccgtttcgatttaaacaaatagtcatcctctttcatgtcttttgtataagcgtatatgtcggcctttaaagactccagtatcagaatttttcttttctttctcgttttgctttcggttgcccacacatggtctttgttcctgacatccctcacgcgaagcggcagaacatcagaaatccgcagtgcgctgttcatgccaaaaataaataaaaaataatcacgatcacttttcttcattaaatactgtttgacttcctggatcttctccaaacttcggatcggctgtacgatatgcatcaaaaaaccccttataatagtaaagtaacatattgagctttatgttactattatagacgaaacccgttgaatgataaaggataaagggtcttatgtaacataatatacatagtgttacataaggtgaatcagatacgcagtttcaataaattcctcaaaaacatcattttcagcccggtgacaagcttttaaacaaatagagacccaaggcattaaaaaatgaaaacaacgtccttaaaaggaaatctgagcatccgtttttttgtgagcaaccgaaaaaaatgcaaaaaaaagacacaatatgaaattgtgtcctagtcttcatcttttacatcaatgtcttcaggaagcggctcatttaaaaactcatgaatcatttccttatatttttccagctgttcgagatgggtttgaaattgttccttgttgattaaatattgctgcccgtcatggacggcccttattttattcgtcaaaacaagattgtgcacatattcttcaggaagactggtaaactcagctgtctctttgatcgttaaatacatggctcacgttcctttcatatgtcatgtgagtgaattctgttttgtttattgtagcttattttttgtctttatgcttgtttcacagctttttcagtccggtttcccatttagcctatttgcgactgattacattcacacagaaactccggctttttgcgcaccggactattccgtttgtcacttgtgaaaacagcacattttacttactctataattgtaagcggaaaacaaaggaggcagactatgaaaaagaaaaagtttatgaatctctgttttatcgttctgctcagtacgttgctcgcggccggaagcatcccttatcacgctcaggctaagaaacacccgttttcctatgacgactacaaacaggtagatgtcggcaaggacggcatggttgccaccgcccatcctctcgcttcgcaaatcggtgcagacgtgctgaaaaaaggcggcaatgcaattgacgccgcggttgccattcaattcgcattaaacgtaactgaaccgatgatgtcgggaatcggcggcggcggatttatgatggtttatgatgcgaagacgaaagacaccaccattatcgacagccgagaacgcgcaccggcaggcgcaacaccggatatgttccttgacgaaaacggcaaagccatccctttctccgaacgcgttacgaaagggactgcagtcggtgttccgggaacattaaaaggacttgaaaaagcgctcgacaaatggggcacacgctccatgaaacaactcatcaccccttccattaaacttgcctcaaaaggctttccgatcgattcggttttagctgatgccatctcagattataaagacaaattatcacacactgctgcaaaagacgtgtttcttccggacggagaacctctgaaagaaggagacacactcatccaaaaagacttagccaaaacatttacagctattaagtacaaaggcacaaaagcattctatgacggagcattctccaaaaagcttgcggaaacagtgcaggaattcggcggctcaatgacagaaaaagatattaaaaacttcaatgtgacgattgacgaaccgatctggggagattaccagggctatcatatcgcaactgctcctcctccaagctcgggcggtgttttcctgttgcaaatgctgaacctcctggatgattttaagctttctcaatatgatatccgttcttggcaaaaatatcagcttctcgcagaaacgatgcatttggcttatgctgaccgcgccgcatttgccggggatccagaattcgtcaacgtccctctcaaaggcctcttgaatccagattatatcaatgcccgcagacagctgatagatattgataaagtcaataaaaaaccgaaagccggcgacccttgggcctatcaggaaggttctgcaaactataaacaagtggagcagccgactgacaaacaagaaggccaaacgactcacttcacggtaactgatcgcttcggcaatgtcgtatcttatacgacaacgattgaacagctgttcggttccggcattatggttcccggatacggcgttgtgttgaataatgagttaacagacttcgatgcggtgcctggcggcgcaaatgaagtgcagccgaataaacgtccgctcagcagcatgactccgactattttattcaaaaataacgaacctgtcctgactgtcggctcccccggcggagcaacgattatttcttccgtcctgcaaacgatcctgaacaaagttgagtacggcatggatctgaaagcggcggtcgaagagccgagaatttacacaaacagcatgacatcctatcgatatgaaaaaggagtgccggaagaagcccgcacaaaactgaacgaaatggggcataaattcggcagcagcccggttgatatcgggaatgtgcaaagcatcctgatcgaccgtgaaaacggcaccttcaccggagttgccgactcaagccgaaacggagccgcaatcggcgtaaacttgaaaaaatgcgaaaaatgacaaggtgaaaagcctcgtttctcaagctgagaaacgaggcttttgtttattctgcactgtattcagatgaggttttttcagacgttaatgacgcaagcgaaagcacaccgcacatcgcgatgacaacacccgctgatccgatccatgtcactgatgcaagagacaaatgagtgacaacaatgcccccgatgcccgccccggccgccatagccagctgcatcacagactggttgaggccaagtaatacacccgatgattcaggctccatcgttgccaaatgatactgctgagcaggcccagatgaccaggcggcgaaggaccaaaacataagcactgccgccgctccgaaagcagaatgtgtgacaaacggcaataacatgagcatgatagcatgaagcgccattccgccggttaatgtcatacgcgccccccatttgtctgcgctgaaaccgcctgctttagaaccggcaagacttgcaacaccgaaaataagcagcaatgtactcagtattccgcttccgatatgagtaacgttcagtaaatacggagaaaggtacgtatacgtaaccgaatagcctccgagccaaaaaaacgtaatggccagcccgactgccacctttcgtttcttcaaaagagaaaattgctgaatgagcggcaccggtttatctccttttatctcaggcaacgcgaaacgtataataagcatggcaatgattccgattgccgcaattccggcaaaaaccaccttccagccaaaagcttcagacacggttcttccgatcggaacaccgataatgagcgccgccgtaaaccccataatgacggttgcgagagaacttgcctgttttcccgggggagcgatttttgctgcgatcgtaagcgcggtgaccaccacagttcctgctccaagcgccatgatcacccgcgctcccgcaaataagccgaatccctgcacaaggaaagaaatgatattcccgataacaaacagccccagagcatagatcatgagcttccttctgtccagttttgctgtaagggccatcatgacaggcgttccgattgcataaacaagtgaaaaaatcgtaatcagctgccctgccgctgccacagtaactcccaaggaacctgcaattttatcaagcatccctgatatcacatattcagacgtccccactaaaaaactgataattgccaaaatgtaaatcttccaggtattttgcacctgacacactccttcattgatgatttatataaagatatattgtgatatatcgatataaagaggtgaacaaacagaaacaaatcgcaatatgtcgatgtgtagtcggaaaaagaaactgaatccctcttctaaaggattcagcctacatttcgcgctgaaaataatcggccatcgcctttatcgcgtcttcatctcttttataataggtgtatttgccaatccgttttgtttggataaggcccgcccgctgaaggatggaaagatattgagacgccgttgactgtgtcatctgaagcttatcggtgatctggctgacacatactccgatctcattcatatcaatgccatcatgcggggcgaagtgacggtccggctctttcagccattgcaaaatctcaagccgtgactcattagacaacgctttaaaaacatcaataggtttcatacgctttattatatcgtgattttacgatatgtcaatattgtttttattaaatctctattttttgttttgcctctcttatgatccgggaaataaaatcactcacattctcttcaaatgtgtcttcccgcccgtattgccttacatgtacagattgatggcggcactctcgatctcccacaacagcaatatacgggatttttttcatttgtgcttctctgattttatagccgagtttttcatcacgctgatcaagctcagcccggatacccgctttcttcatttgccggtgcacctgttctgcgcagtcccggtgtgcggtgtttgatactgggatgatttttgcctgtaccggtgcaagccataaagggaacgctcctgcgaaatgttctgtaatgattccgagaaatctgtcgagagatccgaataccgcccggtgaatgacaacaggacggactttttggtttttttcatcaatatatgttaaatcaaatttctccggcatttgaaaatccagttggacagtggcgcattgatggctccggttcagcgcatcttttatatgaatatcaattttcggtccgtaaaatgcaccatctccccgattaaaccgaaaacgatatccctgttcttttaatactttttctaatgcgctctcagccctgtcccacaagtgttcgcttcccatgtaatcttccggtcttgttgacagctcaatatcataggaaaaaccaaatgcggtgtacacctcgtgaataagctgcagcgccgaagcgatttcactctcgatttgatcctgcgttacaaaaatgtgtgcgtcatcctggcaaaaagatctgacgcggagcaggccattaagcgccccgctgaattcgtgacggtgcacctgaccgaactcagccatccgaatcggaagatcacgataagaacgaagcttttctttaaataagagcatgtggccgggacagttcatcggctttaacgcgaagcgctgatgatcggcttccgagaaatacatattctctttataatgttcccagtgaccggattgctcccaaagacgctggttcatcatcataggggtgcgcacttcctgataatgataggcatcctgcttcgaacgcagaaatgattcaagcgtgtttcggataaactgaccgttcggcagataaaaaggcatacccggcgcttcttccgaaaacataaaaagttgtaactccgatcccaatttccgatgatttctcatctccgcctctttcaacagctgaaaatgtctgttcagctccttttctgaggaaaatgcttttccatagatgcgctggagcattttttggttgctgtcgccgcgccaataagcccctgatacatgagtgagcgaaaaagcttttatctgtccggcagacgccaagtgcggaccccggcataaatcaatgaattcgctctggcggtatatactgattgtatcagtctgcggaatacccgctaagagctcaagcttcagcggttcatgagcaaacagctgctctgcctcttctctggagatttcttctctgataatttccggattttccgaaatgattcggttcatctctttttcaatgacggccaggtctttttcagtaattgtttcatccatatcaaaatcataataaaagccattttcaataacgggtccgatccctaaacaaaccttcggatacagacgttttaccgcttgcgccaatacgtgtgctgctgtgtgtctcatcacttccagtcccgcttcagactgaaaactgcacagttcaatcgccgcgtcaatctgaatgcttcttctaaggtcaaataacgatccgtttatctttccggcggcagatgcctttttcagactcggactgattgattgtgcgatctcttctaacgtaacgcctttccggtattttttttgtttcccatcaggaaaagtaatcacaatgtgtggctccttcacggtctgatctctcctttatttttaataaaataaaaaacacactcatcccaaagctagggacgagtgtgtgtcagacccgcggttccacccaaattcccgccacttcaagtgacggctcatttttgccgtaacgcggctatacggtatcggctgctttcgttcaccaatacagctcaaaaggcggtaagctcattcttcgtgccgggaaggtctcagccgtgccttccctctctgtatggccggttaaaatgtctcatgtccttatcattgcasatttttcttatataaacataaaaacacactcatcccaaaagaagggacgagtgtgtgtcagacccgcggttccacccaaattcccgccacttcaagtgacggctcatttttgccgtaacgcggctatacggtatcggctgctttcgttcaccaatacagctcaaaaggcggtaagctcattcttcgtgccgggaaggtctcagccgtgccttccctctctgtatggccggttaaaatgtctcatgtccttatcattgcagatactttatccgaaaaactttcttttattatacataaattttccgaaaaagaaagtttttttaagaaaaaccggaacgaaaaatttgggcgtacacagctgtcctgttttctcatcttccgttcggtaatgcttttaatccattcagcagttcttcaaacgccgatgtcaaaaataaatcactccggtagatgaatgatatattcatatcccgaaactgttcagggagctcatgaagaaaaagatttttcctgttttgaaaataacggacggctgatgcaggcagaaaggaaacccccatccccgcctgcaccgccccaataatggcttccaacgtaccgaattcaatgattttatgtgcgggtacttcctcttctttcagtatgttctgtattttacggcggtgcgaacagcccgcggcaaaataaagaatcggctctcgcaacaagtcttgcaaactgccttcccgcttatttgaaaccaagaccaattcttcttgaaatacagcgacttgctcaagatcttcgtattcgaccggaccataaacaaaagcgccgtccagctcatagcgtaagacgcgctgcactaaggtatgtgtatcaccggttgacagagatagctgtactttcgggcagcggctgcagtactctgtgaaaaattgagggagatggacggctgccgccgtttcaagagaaccgattcgaagcggaccgttcggatcgcctgcctcttgcgccgttttttgcgcctcatgcagcaattgaaggattctgtctgcgtctttcaataagttttcacctgcaggcgtcagcgtcatcccccgatttgtgcggtaaaaaagctgtgtttgcaattgccgttccagctgctgaatcctgtttgtcacatttgattgaacataatgcaggctttctgccgcctttgaaatacttcctttgcgggcgacagcctgaaaaatctttaagtctccgctttccatgtaagggcaccttcttgctatgatttttattgatagccggctatcaattttcatttatttactgcagctgatacagcctgtaaaatctttctcatcaatcataaaggagagaagaatgatgaatgcccttatcatacacgaaaatggctttgatttcaggcaggcacctgacaaaaggccgggaaacggcgaagtaaaaataaagctgaaaacagccggattaaaccatcgtgatttgtttttaatgaaaaaccacgaaaccggaaaccatgaatttactctcggttcagacggcgcgggaatcgtaaccgaaataggacacggcgtccggtctcatttactgcatgcagaagtcatcatcaacccggtgctgaattggaagactgttgaggacgtaccggccgtccctgacattttaggcggtccgagcgacggaacattttcaccttatgtcatcgttcctgaggaaaatgccgttttaaaacccgaacacctgacttgggaggaagcgggcgtgctgccgttatcagcattaaccgcttatcgcgccttatttacaaaaggacaattaaaaaaaggcgaacatcttatccttccgggcatcggaagcggcgtggcaacatacgccttattaatggcaaaagctatcggagcgacagtcagcgtcacctcccgcagtgaaaacaaaaaacaaaccgcactgtcatacggtgcagaccgggcgattgacagctacggtgactggaatgaggcgctgaatggcgaaaaagcagatatcatacttgacggtgtaggccccgccttatttcaacactatcttgacattatgaaaccgaatggccggatcgtaacattcggcgccagttcaggcgatcagctcggatttcctattcgctcgctgttttttccgcagattcatattctcggtacatcaatgggaagcaatgaggaatttgcggatatgctggaattggtaaaccgctgcggcatccgtcccattatcgaccgcatgtaccctctcagtgaagcagctgccgcttttaacagaatgcgggaaggacggcagttcggcaatatcagcttacgtttggatgtctaaaaaagaggagcggacccgtccgtttgcttatttgtttataagcgtttccgcttgaaattcaatatgtttttcttcatcaattaaaatctgcccgcaaatcgactgcatacacacagagcccgtcagcagcaccgtggtcgactgctcaaggcttgcaaatcgtctcagtctgcggaagaaaacaatctctccactctgtaaaacaaaattctatatattatcttccacgttacctttatatgaccaataaaggaagaaggaggtttcatttcaatacgaaaaaccggctgatcccagccggttttataaataaacccctttatttacggtaaaacagtgctccccattaaataactgtcgacttcgcgcgctgcttcccggccttcattaatcgcccatacaatcaggctttggccccttctcgcatcccctgcggcgaaaacaccgtcaacattcgttttataatccccatatgccgcctgaattttatgatttgccgaatcgacaccgaactgtttcaataatggctgttccgtcccttcaaaaccgatggcgatgaacaccagctgagcaggccatactttttctgtcccgggcagttcatgaaattcatactttccgaattcgtttctgactttttccatttgaatggtgtgaatctcttgtaagcggccctgcttatcggccaccatttttgtcgtctgaattgaatattctctcgggtctttgccgaactttgcctgcgcttcttcataggcgtattcaagggtaaagacgtgcggctgttcaggccacatattgtcgttcgtgcgcgtttgaggaagtttaggatgtttcccgaactggtgcacgctgcgcgctttttggcgcagcgcggttgccacgcagtcagctcctgtgtctcctccgccgattacgatgacgtctttccctttagcgtctatatattgtttgtctttaaagttggaatctaaatagcttttcgtcgccagtgttaaatagtccatcgcataatggacgccttttgcttcccggccttcaatcagcagattgcgctgcttttgggcgcctgtgcacaaaatgacggcatcaaattgatctttcagctcatctgccgttatgtcaacgccgatttcggtatttgttacaaaatctataccttcctgcgtcaaaagtttaatacggcgttcgacgacacttttctcaagcttcatgctcggaatgccgtacatcagcagaccgccggctctgtcggcacgctcatagaccgttacggaatgaccggcttggttcagctgatcagcgcttgccagacctgccgggcctgaaccgacgacagcgacttttttacctgtgcgtttcgctggaattctcggctgaatccatccgttctcaaaacctttgtcaatgatcgtccgctcgatgtttttaattgaaacagccggatctgaaatagccagcgtacaagatccttcacaaggagcgggacagacccgccctgtgaattcaggaaagttattcgttttcagaaggcgctccaaggcttctttccagcgcccccgatagacgaggtcattccactccggtatcagattataaatcgggcagccggacgtaaaaccgttgatatcagcgccgatttggcaaaacggtgtgccgcaatccatacaccgcgccccctgccgctttgacgcttcatctgaaaatggagccgaatactctttccaatcctttaagcgagtgagagggtcccgctcagccggtttttctcgtttttcttccatgaatccagttggtttccccatgttcctctcccctttcttactgtactaccgcttgtttatggactttggcaggcgtttggtgaacctttgtattggcttcaaaagcatacataattgcgtcttcttctgataaacccgccgctttttgttcttcgatgctgaggagcatttgtttatagtttttcggaatgactttgataaaggtttctgcggctttttcccaattgtccagaagatctgcggcttttttgctgtttgtcagcgccgcatgccgtttgaccatttcttgcacttctttgatctccgcctcatccatcagcttttcaaatgaaatcatttccatgttgcatttgcgtttaaatgctttggcatcatcactcaggacgtatgcgataccgcctgacattcccgccccgaagtttttgccgacttcgccgaggacgacaacccggccgcctgtcatgtattcacagccgtggtctccgataccttctacaacgacattgactccgctgttacggactgcaaaacgttcacctgcgcgcccgttaatgtacgcttccccgcttgttgctccgtaaaatgcgacgttcccgataataacgttatcgtgcgtttcacaattgaaggcatcaggcgctttcacgatgatttttccgcctgaaagccctttgcctacgtagtcatttgaatccccgttcaaatgaagcgtcatccctttagggacaaatgctccgaaactctgtccggctgatccggtaaaatgaagtctgatcgtatcatccggcaggccttccgctccgtagcgtttagaaatttcacttcccgtcacggtcccggctacgcgatttgtattattgatcttgatttcagcttccgcttcctgaccggcttcaattgcagcctgcaccgccggaagaataaccgtcatatcaagcgactcgtcgattttatggttttgcgccgtacggaaagtgcgtacgccttcaggctggtacagcagtgtggataaatcaagctggcccgctttccaatgcgctttcgcacgttcactgacatgtagaacgtctgtccgtccgatcatttcatcaagcgtcttaaagcctaactgcgccatatattcacgcacttcttctgcgacaaacagcatgtaatttacgatatggtcaggatcgcccatgaattttttgcggagctccgggttttgcgtcgcgacacctacaggacatgtatctaaatggcaggcgcgcatcatgacgcagccgagaacgacaagcggcgctgtagcaaagccgaattcctccgcaccgagcaaggcggccattacgacatctcggcctgtcatcagcttaccgtccgtttccaataccacgcgatcccgtaaaccgttcagcatcagcgtttggtgagcttctgcaagaccaagctcccacggaagacccgtatgtttaatacttgttttcggtgacgcgcccgttccgccatcgtagccgctgatgacgatgacatccgcagtgccttttgccacaccggccgcaatcgtgccgacgccggcttttgacacgagcttgacgctgattcgcgcgcttcgatttgcatttttcaaatcatgaatcagctgcgccaaatcttcaattgaataaatatcatggtgaggaggcggtgagatcagccctacacctggtgtagaaccgcggacatccgcgacccaaggatataccttgttgcccggaagctgaccgccttctcccggcttcgccccttgcgccattttgatctgcaattcatccgcattgacgagataatggctctttacgccgaaacggccggaagcaatctgtttaatcgcacttcttctgtcgtcgccattttcatccggaacgaaacgtttcgggtcctcgccgccttctccgctgttgctttttccgccaagcctgttcatcgctatcgctaaagcctcatgggcttccttgcttaatgaaccgaatgacatcgctcctgttttaaaacgtttcacgatggaagcagctgattcaacttcctctaattttaaaggcttgcggtcttctttgaaggcgaacagattgcgtaaaaatccgattcgttcttcatccgctgcatgagaatactgcttaaacaggctgtaatcatttttgcggcaggcccattgcagcgtatggatggttttcgggttgaaagcgtggtgctctcctccgttccgccattggaattcacttcccggatcaagggtttggctgtaatcatccttgtacgccgcttgatggcgctgtttcgcttcttgcgcaatcgtctcgatatcgattccgccaagctgagatgcagtaccggtaaagtatttggcgataacgtcttcaccgatgccgaccgcttcaaaaatttgggcgcccctgtaactttgcacagttgaaatccccatttttgacatcactttcacgacgccttctgttacgctctttccgtatttgctgacagcttcttcatacggaatatcaagccggccttcatcgatttcctgcttatacgtagcgtaagtcaaatacggattgacagcatctgcaccatacccgatgagagccgcaaagtgatgaacttcacgcgcttccccggattcaacgataatgcttgcttttgttcgcaggccttgacggatcaaatgctgatgcagcgcactgacggccaaaagcggcggaatcggcgtcaattccttactcattgccctgtcagataaaattaacagagatacgccttccttgatcgctttttccgcctgctgaaacaaatccttcaggcctttttctaggtcatcggaaaacagcgtgcggatgttctggctcttaatgtcaggatgcacaagtgttttcagcgcataaaactgttcgtttgataatacaggagtatacaattttatgcggcgtgcatttctttcactcggatgcagcagatcgccttcagctccaagccaggtcaccgtagaggtcacaagctgctcgcggatcgcatcaatcggcgggtttgtgacttgcgcgaacagctgtttaaagtaatgaaacagtgattgggcgcggtcggataaaacggcgagcggcgaatcatttcccatagagccgagcgggtccttgccttctttaataacaggaattaaatacttctgaatatcttcatacgtatagccaaacgctttttgacggacgagaagatcatcgaattgttcctcttcccggatttccgggtcaggattcacttgaaccaattcttcttcaagccatttttgataagggaattcattggcaatttctgttttcacttcttcatctgaaataatccggccttcttctaagtcaatgagcagcatttttccgggctccagacgttttttatgaagaatggtctcctgctctacttcaataacgccgacctcagatgagaaaataatatggtcatcttttgtcacatagtaacgtgccggacgcaagccgttacggtcaaggatggcgccgatctgttttccgtccgtaaacgaaatggcggtcggcccgtcccacggctccattaaagagctgtgatattcataaaaagcccgtttcgctttagacatgtgagtgttttccgtccatggttccggaatcagcatcattgccgtatgtgccggtttccgccctgccatcacgaaaaattcaaacgcattatcaagaatggatgagtcactgccctcagcatttagaatcggcagcactttgtgaagatcgtctccgaagctttctgaaacgaactgctgctccctcgctctcatccaattgatattgccccggagcgtattgatttctccgttatgaatcagatagcggttcggatgggcacgttcccaagtaggaaaggtatttgtgctgaaccttgaatgcacgagtgaaaatgcagatacgaaggtttcatcctgcaaatccaaataaaaagcgtcaacctgctcaggcgttaacaaccctttataaacaatagtctggcttgacaagcttgcgaagtaaaaatcaagctgttcttgaacgccccaattttccgcctgcttccggatgacatacagtttgcgttcaaaagcaaggctgtctttcaaatcgtttgcggcgccgatgaatacttgacgcacatatgggcaagtgccttgtgccactgttccgatttttccgacatttacagggacggttctccagccgagaacgatctgtccttcctgctcaatgaatgcattcacctgtttttcgatcttttttctttcctcttcattttgcgagaaaaagaccattcctaccccgtaacggcctttttccggcagtctcatttctccgcactctttcttaaaaaaagcatcagggatctgaaccatcaggccggcgccgtcacccgtattcggatcactgccctgtcctcctctgtgatccagctggcaaagcatcttcagtccttttttgacaatgtcatgtgaaggtttcccttttaaatgggcatacaagccgattccgcatgcatcgtgctcaaattccggacggtagagaccttgtgctttcggcatttgattgtaagtcataattcctctcccccgatcagtttccgttaattatcggtcataaaatctgacaactttaaattaattgtaagttttcaaaacaatataaacaatatataatttagatcaaatacatctcaaaatgagatagataggtgtgaacgcaatggaattacgccagcttcggtattttgtggaggtagcagaacgggaacatgtgtcagaagcggctgatcatctgcatgtcgcacaatccgccatcagcaggcagattgcaaatcttgaagaagagctgcaagtcactttatttgaacgggaaggcagaaatattaaattaacgccgatcggcaaacaatttttagaacatattaaaacggcgatgaaagcaattgattacgcgaaggaacaaatcgatgaatatcttgatccgaatcgcggaaccgtcaaaataggatttccgacgagccttgcaagccagcttttgccgacggtgatttcggcgtttaaagaggaatacccgaacgttgagtttttgctccgccagggttcttataagtttttaatcgaagcggtaagaaacagggatatagatgcggcgctgctcggccccgttccgacggaattccccgacataacaggcaatatcttattcacggaaaagatttacgcgcttgttccgctgcatcatccgcttgccaaacagaaaaatattcatttaattgatctgcgcggcgaccaatttgttttatttcctgaagggtttattctccgtaacatggcgattgacgcttgcagacaggccggctttgcgccgcttgtatcgacggaaggcgaggatttagatgccattaaaggattagtctccgcggggatgggagttactttattacctgaaagcacctttgcagaaaccacaccccggttcacggtcaaaattccgattgaatttcctcaagtgaagcgcaccgtaggcattattaaaccaaaaggaagggaactggctccgtctgcaaatgatttctatcattttgtcattcaatttttctccaaacttgaacaatatcaataaaaaacaaacccgagcttcaaaacgaagcctcgggctttttcatatttttatagatctttctcagccgatcggaatggatagttcaacgtggcagacaaacgcttccggatcaatgactgattgatcggtctgtttgggcggcgtttctttaaatgtcttcagctgggctgaggaatagttgacgatgccgagtccgagctcttctccctgctgatcaagcagcctgacaaccgctccgctgctgaatctgcccttaatctgctcgatgtcctgcggtgacagctccatatttccgtttgcgacatcgcggctgctttctttttccatcacaatttcgccttcggggccggaattaaatgcaagccattgttctttgtggtttaacggcagggttcctttcgcttcaaaataagttccttcagccgcctcatctaccgcttgaagcagaatgtccggaatgttagcctgcccgagaaagcctttaataccggaggccatcacaattttaaaagcatccagtttcgaacgcattccgccggttcccatgtcactcccggcatctcccgcgcttgcttctatttccggagtgatgtcacttacatgacggattcttttcgctttcgggttgctgcgcggattatcatcatataaaccgtcaatgtctgataaaatcacaagcatgtcggcatcaattaaacctgccaccttcgctgcgagtgtatcgttatctccgaatttcagccggttgactgtgaccgtgtcattttcattaataatcggaataatgccccgttccaaaaggacgttcatcgtattgcgcacattatggtagcggtattcatcggaaaagtcgcttcttgtaattaaaatttgtgatgcgacataaccgtgcgctaaaaacagctttgaataagcctccattaataatccctgcccgatggaagcagaagcctgtttttcagggaggctttccggtttctgaataaatccgagcttccgataacctgccgccactgcgccggaagatactaaaatcacttcatagccgctgtctttcagctgtgcgatttgatccaccaatgcttccagctttcttctgctgatttccccgtgcaggctcgtcagtgagctgctgccgattttcaccgcgactcttttgatcttcgtccgagacgtcactgtatcactcctgttttttaacgattatagtgctgccgttttttcaattgttttgctgatctcaatagaacgttcggtcgcgtgtttaatggctttggcaatggcttctccgccgccttctgacctgagcgcatcgaggccggcttccgtcgtgccgtttggagaggtgatgttttcccgaagcacatccggtttttcacccgtttccatcagcattttagcggcgcccaataacgtttgcgcgccgattttgcgggacagccgtttgtctaagccggcttcttcacctgctttttcaataaactccattaaataataaaagtacgccggtccgctgcctgcgatgccggtgaaaatgtccatctgatcttccttgatcacgtacacttccccgaggcattccaaaagggataccgcggtttttgctgaaccgtaagagacatggtctccgaaagccgcagctgttgccgattcgccgatcatgctggatgtgttcggcatcactcttacaaccggctgattatcatgtaatgattgttgtataaatgaggttgttatgcctgccagaacagacaggatgatttgatgaggttgaatacgccgtttcagcgcagccagagcgatttcagcatccttcggtttcatggctaaaataaagacatcaatgtcttcggttttcatgctgtcaaaagcaatgccctgaataccgtattgatgttccaattcagcgagtcgctctgtattgcggcggtttgtcacgcagatgttttggttgggaattttttttgcgcggaccatgcctgatatcattccttcagccattgatcctgctccgataaaagcaactttcttttgatctaagatcggtaacatctcccttgttcgtattttgttcgtatttttcacacgttttttatgttaccacttcaagagtcgatgtcaagtttgaaggttttattgatatgtattgttccgagcctgctattatgtataatgaatcacagaacataccttttgagcccgggaggccgggtgcgttccggccggatttaaaaattatctgaaatggctttttctatcagctttttgcagcggtcaagctctgtcttcagctgttttttgtaaagcttcgcagcttcatagtctttaaattgatagagaacgacttcctggagtttggctccctcttttttcacttttacttgctttaaaatcccgtcatccaatagttcgtgaagtgaacggtacacctcggtatgattcggcttaaaaccgatgggtttaaattccgaacgcagcacctcgagaagcttcagtccgtaaagccgttcctgctctgtcattgtaatcatgtaaagctttaaaaaagctctttgtttcactaaaaaaccggttgaacttcttttttcttctttcaatatgtgcacaccctttcctctaacaaataattccatgtactaaatattctctatagatgcccttttccctttttatatgctgtatcagttttatttgtatcttgttgtttttatggatagagggaaaaattgaataaatgaacatttggtacatagtttatttagtataattataacatgtttgtgccgatatttcattcttccgttcaggggtagtaccacatcactatcaagttaaaaaacaaaataccccctaaaatgaaaaaatactgtaaagtaataataaagatttgatattataatcaaattatcgaaatgtttatttggaggttttattaatgaacattttaagttcttggttatataacatgaaaatcataaaatacttattgggaaggagttgataatttaaaactaaaggagagatattaatgatatatagaaaagcaaatcagaaagattatgatacaattttgaatatatgggaagagtcggttttagctactcatcattttttaagagataccgatagagaagagtttaaaaaagaaataccctcatatttcccacatcttaatgtccagttatggtatgagaaagaagatttaattggcttttctgctataaataaacaacacttagaaatgttattcttaaaacctaataaaataggtaaaggatacggtaaagctattattaattctttaattaaagactttgatattacaacagttgatgtaaataaagacaataagagtgcaactaaattctatattaataatggcttttttatagaaagtgaaacggaaacagattcttctggacgtccataccctatactagagctaaagttaaaataaggtaaaggtgaaaatcctcccttacctttgatttttgcactaaactgcacgttagtccaataagaattaaatatttggcggtgtacgcaggtgaaaaaattgctatacattgtgccatcaccaagttagatatctacttagaattgtagtgattatagtaaaaataaaaacaacaggataatcataaatgtatgttatccaacgttttttatattatcgcaggattgaatgtttatattattaattgtaatttccaaagttcccaaagcgtcttttgggaactttatttgcttaacgttgtaaatccgcatttttctgacgctaccccaattataacttattttaatcttgatatttccttatttcgggttgtgacagcttcgctggtactcccccgttcacggaaattcagaagacgaatcttttgatctattaacattcccttcaaaagataatcagaagcgccgatggaccgtttcgaatggaataaaaaagacccgtcatgaagacaggtccccttttgtttaaggattggttgaccacaaaccggcagttttgatgaaaatgcgcggatgtaatttcaattgagcaaccatatattctgcaagatcctcaggctgcatgactttttccggattgccgtctgtcagatttaattcaatagacatgtcgctggcaaccgtgctcggagtcattgcgctgacacggatgttgtgttttctgacttcctgcatgagagattcagtcagaccgagaacggcaaatttagaagcgctgtacgcacttgtcgccgcggcgcctctttggcccgccgtagaagaaatattaatgatatctcctgattttctctcaatcatttcaggaagaacggcgcgtgtcacgtggtatacacccattacattaacttgaatgatgtcttcccactcttcaggcgtaagatccaaaaatccgccgaatttgctgattccggcattgttaatcaagatgtcaatctcaccgagttcttctttaatagaggagacggcttgttcaacctctttttggttttttacatcggcagcagcgaatgatgcctttacaccaagggctttcacttcttccgcaaccttttcgacatttgcttctgtgcgcccgattaaaccgatattgactccttctttggctaaagcgatagcggcggcgcggccgattcctctgcccgcacccgtgataagagccgttttgttttgtaagctttccacgtctttcaccctttctgaatgtccttatgtacgatttcacattataagcagaaaaaaaacaattagcaaataaaatgattcaacacgatccgtaaagggtatcaactgaaaaaaaggagtgaaaagcagatgatcatcattttgtatatcagtgctgccgttgcggctgccgcattaatttatgcagccgtatccgccgtgcattttaaaagaaacacagcgcctgatataaagaagattaacgccgcgacagcgtccatgcagacggccgttgatgaaatcaaaacagaaaccgatctgttatcgcaaaagcagaaagagctgaaagaagattttctcactaaaaaaacagccgtgcaaacgacggcggccgaagttaaaggaacgcctcacgtcctgaagatgctctggaacgccggtaaaagtgatgtatgagcctgcatgtcatccgacgtttttgatgacactaagagaaaccggcggattcaaggaggcataacatgatttgcgatcgtgagcggcttgcgcattttttgcagcagcttaaagcactaccttcttcgggagggtttacaaaatcggatttgctgactccggctttccatttagctaaggacggagatctggatttgtattattcgcctcataatgaatatattaacccttatgcagtcgttgccatttccggaatcacacccggtttttttcaaatgcagctggcttacaaaaaagcggcacagcttttaaaagatggcgaaactcttgaaacgatagcctatgaaacaaaaaaagcggccggactttccggttcaatgagacagaacatcatcgaaatgcttaatgaatgcggtctgccggccgcgcttcacgttgaggattcatcccggttatttgattcaaaacgggagcttcttcatacaacgtccgttatcaaacaccctgttttttataaacagaaaaactatacgggacatcggccggcaatcagcaggtcagctcttctaagccgttacgcgctgacatgttttccggatgaaatagaaatgatgaaaaaggacattctgcttatccctctcggcaaagcagcagaatcagcctgccgcatgctgaagaagaacggcagaatgggtcatgcggtcattctggaaggcttcccgcatccgtccggagcaaacggacatcgtttcaaacaatttcacgaaaacaaacaatcgttacgtgaacaaattcagcgctttgccgggtttcttcagcagctgtaaaaaaagcgccccgaattttcggggcgctgctgttaagaagcgtattcaggcaatgctttattgtgttttgccgttttctcttcaggtattttgatttgattggtcaagattgcacttacgaaatagagcgctgcgaaaatccatacaacgccttgtgcgccgacaagcccgatgaacgcccaggcaagcgcggggccgacaaatgccgacaggcccgcagccagatttaacacagacatggcagcacctttatcgctgccggccgccgtcggcacgatagccccgatcggaacgaatccggcgaggagccctccccatataaaaccgacaatgctgacgaaaagcaagttcccatgtgatacaacaggagcataatataataaaagagtaaaaatgccgcagcccactcccccgaaccacatgacagtcttcttccagccgaatgcatcgccgactgcgccgaagattaagttaaagacgatatttccgagaaagatcgttccccaaatttgaagccatacatttgtagaaatgccgtgctgcgccatatgcatcggaagaaataccggaaatccgtatgtaccgatgctgttaatgatccgaatgatccccccagagagcacgcgcggattttcagcaaggatggtgattcccttcattaattcctgcgccttttcccgcttatctgcctttttcttttcaaagcggtccctatttaaaatcaaagcaaaaaacgcgccgaggcagacccagaaaattgaactccacagtgtattcaaatagccgaaggatttgatggcccagcttgaataccaagcaccgaatacaaacatcccgcagcaatatgcaatccagaaccagccgaccgccgtactgagcctgtttttcggcgaccggtaaatcacccatgtcaaaaaagaataggcaaacagcggataacccagccctttaataaaatacgtgacatacatcaccggcaaattaagattttcaaatccgtatgcgataaacgcggctgttccgataacgtaaaacaacagccccataaacatcgtccgctttgcgccgaaggcttcgaggcagacccctgaaaaccaagacgccacagcgagagaaacaccgtaaaccgtaaacagggctgctgattgctgtaccgtcaagccgttttcaactaaaaacgggctgagccagccttgttcaaggccgtcccccatcataaacagcacgactcctaaaaatccccatgcgagctgtttcggaattcctattttattaagcatttttgttcctcctcagcaatctttcatgttgtcatctcatccccaagtcaggctttcaccgccggctgaaaatgagtaaataatttttgcgtatatttccattcttcatataggaagagatccgtctgatccgcttccggctcaattacctttgtgcggctcgaaagctctgctttcacaccgagagcttcgttgcaaatcatcgccgctcccattgcggatgcctggctgaacccctctctcttatagattttcttttggagaaggttagcaagaaactgcgtcaaagcatcactttggaaaccgccgccgcacaccttcacatcatcttgtgaaaaggaagccacctctgttaacgcctcatagttccatttgattgaaaaagcgatttccagcagtgcggctttgacaaaatgggctctgcttaagttttgggacagcggagcgtcaaaaataaatccgccttttgccagtgcgtttttctcaggcgataaataggagcctaacgcagaaatacaggcatgatcatgtttcggcagacttgcgatttcccgttccataacgccgtaggattcattcggataaaaaatggattttaatttttgataattgagtcctgttacacccggattcgtttcaagaagccattgaccttcttctgtatggcaattcagccatgcattctttaaactttcggttccggtctccgctgttatctttgtaatcggcgtcgtcgtgccggatacgatgacgatatctcccggctttgcatctgcacttttgatggcaagctgtgtgtctcccccgcctgcaatcacaggcactctttcagaaaggccgagaaccgccgctttcttaaacgttaacattccgacaaccgtcccagatcggacgagtgaaggaagaatggcagaaggcacaccgaagatgttgcataatttctctgaccacgcctttttccttacgtcaaacagcagtgtttcagcagcctgtgacggttcatagcttaaaataccgctcagctcaaatgtcacccagtcactgatgcttgtgatgtacttcacttctttccataaagacggctgtctggcttttaatccgacaagtttcatggcggaaaataaagcgctcggaagacgtccggtttgctgatgcacttcttcttttgtctcaatcccgtcttcccattcacggcctctgttatcaatgttgggcaaaccgagaaatgcctttttacctttattgatcagaacaattccctgcctctggcttgttgaggtgattccgattaatgtaatatgtgggcttttggcaataaccttccttgccatagcgctgatttgcttccatatcccttccggtgagaaatatcgtccgtccggataaagcggatccgtcacatattcaatgtcttccctttcaagcgcggtcacttcgccgccggcagtcacgaccgcgactcgcgcattccccgtcccgatatcaaatacaaggtagcctttttgttcagccattacagcctcctccttccgtttcaagttctcttttgttataaagttcacgtattgagcaggtttgatcttgtttccatttgaaaagcgcttcatttaaaatcttcacatgatgatcttccacttcaaatgttgcgcccgctaaatggggagtcgctaacacattcggcaaagagatcaattcataatcagaagattcaggcggttcgtgataaaacacgtcaaggatcgctcccttaatccgcccttctttcagcacccgcagcagctcttccctgtctgtaaccgccgctcttgacgtattgacaaaaacagcttcctgtttcatcaattgaaagtgccgggcgccgataaggccgatggtttcttctgtgcgcggcaagtgaacggaaacaatatcactttcagaaaatacccgttcaatcgtcgttttttcatactcccggttttcatgatggacaaatgggtcatagtaaagcaccctgcagtcaaaagcggccaataaccgggcgattctctgtccgacagctccgaaaccgataaggccgactgttttccccgtcagctcatttcctctgaatttgacataagcctgcaaataatcaccattccacttcccgtccttcagccactgatgggaagaatacgtatgacgcaaaaatgaaatcacatttccgataaacatttcagcaacagcctgggcattgcgggccggtgtaaagaaaacggggatttttcttttagtcgccgccgcaatatccacgttagacggcattcctctgcagacaccgataaaagcggaatcgggcaatatgtcaataacacgctcagacacctcatcaagttcagtaataagccccgacgcgtttgtctcttgaatcattcggattaattcatcttcccgataggcccggccgtgcttcttccacggccggtgcacagtccggccgaacagctcagtcagctctttcagcccctcgtcgtgatatagtgcggtaattaaaaccgtcatggtgcaaaacatccttttcacataaattttttcataaaaaaatctctttccccaaagaaggaaagagattcatataccgtctttatgcgcttgaagcgcacaaatatgtatagatcattctttcctatctttcaagcatacgcttgctggaattggcacaataaatgttgccgaggtttcgtagggccagtccctccacctctctggatagaaaataaaatgatgaaattgtcaggctgtttaaaagaataaactcatcatagaaaagtctttccatgatgtcaacactttttttctgaattgacgttcgattttgaaatgttataatgcttacaatataaacaaagaggagaaatgggctatgaattctgctgcaacacagccgaacggggtctttaagtcggtatgctcactagactgtcccgatcaatgcggcttgcttgtgacaaaaaaagacggaaaaatcgttaacattcagggagaccccgatcacccggtcacatcagggaatatttgcaacaaagtcagacacatggctgagcgcatttatgatgaaaagcgcgtaaccgttccgttaaaacggatcggtaaaaaaggtgaagccgcgtttgcgcctatttcctgggaggaagcgatcaatacgatcagtgcgcgctggaaagagcttattgccgaagaaggagcggaaagcattcttccgtacagcttttacggcaatatgggaaaactggcggcagagggaatggaccgccgttttttccatcgtctcggagcgagtcatctcgaacggacgatctgcagcaaagccggttctgaaggctataactatacaatgggagaaggagcgggtactgatccggaggagaccatacatgcaaagctctttattttttgggggatcaatgccgtcagcacgaatatgcaccaagtcatgattgctcaaaaagcccggaaaaaaggggctaaaattgtcgttatcgatgtacataagaaccaaaccggccggcttgccgattggtttattcccattcgccccggcacagatgccgcactcgccctcggtatcatgcatgtcttattcgacgaaaaccttcacgatgaagcatttctcacagaatacaccgaaggcagtgacgaattaaaagcgcatgtcaaacactatgatccggaaacggtttctgctattacaggcgttaaagccgacgatatcagacgccttgcgagaatgtacggggaaacctccccttcccttatcaggatcggaaacggcattcagcaccatgacaatggcggaatgatcgtccgcaccgttgcctgccttccggctgttacaggacagtggctcaacaccggaggaggcgcaatcaagcataacagcgcggtattaaactataacagacaagcgctccagcggcctgatctgctttacggcaggaagccacgatcatttaatatgaacaggctcggaagcgttcttttagaaacaaaaccgcccgtgcgctccctgtttatttacggtacgaatcccgcagtggttgcgccggaagcgaataaagtcagaaaaggcctgatgcgggaggatttatttacagtcgttcacgatctgtttttaacggaaaccgccaaatatgcggatatcgtgctccctgctgcatccgcttttgaaaacacggatttttacacgtcttactggcatcattttattcagctgcaaaaaccggtgatcgaaccctacggggacagcaaatcgaatacggaagtgttccgtttgcttgccggagcaatgggatttaccgagcaggagcttcaggattccgatgaagaattgatcagacaggcgctggactttcccgacaatccgtatatcgaggatattgattacgaagcgctctcacgccattccttcatgaaagccaaacggaaaaaaccgctttttccgggaaagctcaagacaccgagcggaagaattgaattatattcggaaaagatgaaacaagacggttatccggcgctgccgacacatatccctcttgaaagcgatgacgattttccgcttttatttgtcccgggaccgaatcataattttttaaactcgacattttcgaataacgaaagacacgtaaaactggaaaaagcgccaaagctttttattcatacagaggatgctgtacgccggaacatagaagacggggaaaccgttagagtttggaatcaccgcggcgagtgtgaattaacagtttcagtcggcgaacaggtgcttcccggcgttgcagtcagccaaggtctttgggccgatatggatgataaaaaacagctcgtcaattcgctcacgcccgatcggctggcggatatgggcggaggcgctgttttcttctccggaaaggtgcaggtggaaaagctcagcaatcaaaaccgtccgcaataaacgccgggcggttttgatgaaggctgaatcctttcggccggcttcaacgtataaaaagtgataacgtttattggaggtttgctgtatggatatcataccggcatcggaatcgctttagccggatatttcataggagacggattgaaaaactttaaatcacctgatcctcatgaacacactgaccacattctcattaaagaaaaagatctgcacttctatattggttattatttaggagttacgaaggaagaagcaaaacaaattgcccgacacctctgacattccgcatatcacgagaaacggaaagcggtatgtacagaaaactgcattaagagaatggctgacttccatgctggaaaaagaataacagctgccatgaaaagcgggaagagtttttctcttcccgtttattaagattcgccgccctgcctctcttcaaccccaaacatacgatagatatcattcttacgtaacgaaacatccccttctttagatttcaaataaaaccctttcttatataaccgtatgacttcctcatatgtaagctcatgacgaaggagcgccattaaacgcccgtctttttcatcttgtttattgaaccattcatactgttctgaccagttcactttctgcatgtcaaacaccttctcactttggattaatgcccttttcgcattcttttacttattaccccttctgtaaacattccgattacctgtgacatttttgaaaacagccgtaacccctcccattagtcaccatgttgacttgtttctcatttcgttgtatattataattgtcaacatggtgacaattcagataggagataccttatggatattaatttattaatgaaggaactgcatgttatgcaacaaagttacgcatcattattttcggttgtcaataaagtgcaggctcggggggacgaatacttagaaatgttgacttcccgacagcacatgactcttattgctattgcccatttaccgacggaagataccacacttatgaatatcgctaaaaagctgggcacaacaaaacaaaccgctaacaaattaatttcaagcctcgcgaaaaaaggatatgttcacactgtgccaagcaaactggataaacgtgcaatcaatattgagattaccgctgaaggaaaaaaagcgttaatttcctgttcagaaaaatccacctattttttagcggatatgtttcatgacttcacaactgatgaaattgaaacattctggaggctattgcaaaaactttatcgttttgatggtgaagaacaggatggttttgaagaaaaagcacatttgaaagttgaagatcaggcacaattcatctcagatgactatgaagaaaaaatcatgactgaattttcaaaacggcgatatgggagtgcagacgatgaataatatgctttatcgaaaagtaaaagaaacagaggataaaatgaaggaaaaatgctatgagctgaaagataaaattgatcaatttatttctcatactaaatacaaaattcattgcaaccgtaaactggaccgagccggcaattatatatcaattgccattggactctttatcctaactgcctcatggctgaccgcaacacaatggctgctttggataggcgcggcgagtattttgagtaatgcctgcttgctcattataaagcctgttaaaaattgaaaatctgaaaaaagctctctaaaagagagctttcttttattaatcgtcccagtcttcatcttcttcccagttttctttcatctcatgaagtctttcataaaagaactttataaaatgggcagaattaagttctttatagccaccgaattcactccaaataacaactggacattctccttcactgttgattttattggtatctaaacaatacccaaaaaaatcaacatgttctatgactactaagccacttggcaatcccctatattcatgatattccctggttgtttctacaactgaagcaccgccaaaatcatagcctaataaatcgattccataaaccccgccagaaccatattttctaagaaaccatttgtagctatctggcaacgtgacttgaagatcttgctcaatttttaaaattttatcttctccaatcccacccgtaaaatctttttcttttgcattatcagctatgaattcttttacttttaaataaaaatccatggtttataaccccttattctttctcatattgttttgctctccacttccaataccttgtcttaaagttattgtactgtttctccaggtaaacatcattccggaagctttctccattacctttaaggccatgtattacgtcgctatactttgtatgtaaactattaggtatctcaagcaacggtccactttcttcttgtatgaggtgatgtaagttaatctgtgttccgtctttagcataaggagacttaccatctttcattaattccaggttggtttttccttttggagttttttgattaatatcaatgtcctttaaggtatagactctacggcttacatctctaatttgtcctttaacttttactttgccgtctatttcaacagcaccatacttttctttatttaaccaaggaaggtttatttcttgaccagtaaacggctttctcgttccatccgggattttctttgcattggtcaaaagttcatttttaaggttttggctgtcaaccacattgtatggtacgtcacccgacagagcaagcttatacttaggattatacggaagcaaatctggaatcttgacgtccttaattctcttccctgcctgtcctgccttgtttatgaccttccccgccgcatcagctttgttaacggctcctgcgcctttcgttccgacgacagccacagctgctgaaccaattgcatatgtcacccatcttgatctggagtaagcatctccatttaccatatccttttgatacgattcctcgattgctgctgaaacagcatcatatgttttaacaggatgaagtactgcattccccagtgctgacaaggtttcccccggatcggttatgaagtcccatagaccggttaccgtgtctttcccgacatcatataaaccaacgccagctccttttaaaatatcccaagtcacttctccggcttcttccatctgttttgcttgttcaagctgaatgacatattgctgctgagaaggttcaaagttttcatagccgatcttcttcgcaatttccaaatattcatccggatcggtcacaccgtcagcgagctttttcttcagatccttgatttcccgctcttttgcttcttccttcttaaacgttaaatatgtgtctgagtgtcttgcaatctcgccttttttcttatgtatgtcactttccctgtacgccttggcgttatagtgaagcggagtggcgtttttccctttgcctgttgcgttttggagctgctgaaaatcggcctggatgaaatgttcatttgcctcggtttctgcgtattctttcgttagattgtgatcaagctttccgagcttatgtatggtatcgtcccgttttttgtctgctgattccagcttttgatcgacatcttctgtagagaaaacatcaagatgaatgatatctctgatttcatcaaggatacctttcatttcattgcgctgctcctgcatgatggcttgtgatttattcttcgcatggatcagctcgtgttctaaaaaggactcttccacaaacgaatcggccaatccggcatcagctacttttcctgaaatactgttaagaaaagcaattttcatatcgatcagatcaagccagctgtctgtgacaccagcgtgatcttggaagaatgctttgatgttatcagcacctttacctgaaaactcactgtcatctaaatcagccattccctgaaaagctttcctgagattgataaattggtctctaacctgatcatattcttttgctcgtttctccgctgctgagattaacgaggatgcttcaaatactttcatttacggctcctttctgcttctttccgtctaaattttaccataggatataagattagatgaatctcttgcatttgtcgaactgctttattcaagatcataaaatttcaaagaaaaccttacacgaaggaatctgggatcggcaaaacaaagccagatataacatatattaaaaaatctcttgcatttctacacccgccatgctatattgatatagcgatgagctgaattgtgtaagccgatgcacatgcccttgcggcacacacgaatgtggcgtgtggtgtatcgcctcaatacgcaaaagacgtttgcttctgcaaacgtctttttttattatccgattttcgttccgttcggtactgtctgctctggcgtaagcaggacaacgtctcctttttccgggatgccgccgagaacgagaacttctgacttaaatccggcgatccgccgcggcggaaagttgacaatagctgtcacctgtctgcccgtcagatcacccggttcgtaccgttttgtaatctgggcgcttgattgtttcatgccgatctcttcgccgaaatctattgtcatcttaatggccggcacctttgcttccggaaatacttccgcttttacgaccgttcctattctgagatcaagcttgataaaatcttcaatgactgccatatcaaaaactccttttttacaatcatgttaccaaaaaaagaagcagtttatttaaccgattttcaggattatttatcagattgaaaggtgtttcggaagacacgcggcgttattcccttatgtctgacaaaccatctggtaaaggaagacaaattttgaaagccgacctcctgactgatgtctgtcagccggcattttgtttcaataagcatttgttccgctttcttcatacggagctcagcaatataagcttgcgggcttttccccgtctgctttttaaaccagtcggaataatacgccgggtggtaatgttccattgcggcaagctctttaattgtaaaagtctttgagagatttcggcggatatacgcaattgaatcatttgtacggttttcttgtatcttttcagcaatatattctgcaagcagactcaatgaatgagccgattgctgctttgtctcttctgtcagcagaaaccgaatcgatgtccaaaaaggatcaagcttattcagaacgccgggggcaaatgaacctttgaaaaaatatgccggtatgtcgagaacgagacattcatttcgctccaaagaacggaaccgatgttcatgcccgggcggaatatacaacatttgatcaggttttaatctgattttacgtctttctgtctccaggtccagctgtccttcgagcggaaagagcatttgacagtatgtgtgtgcatgagaatcaaaaatatgtgaataggtgcgccgctcacaaatgatatgttgtaatgaatccatttgtccctcctttttacatgatgcgtctttttatttagtttacataataatattattgtttcctctcctgcaaacctcttaggaaagcaacaactgcaaacttccggctttccttaattgattcggttaattcaaatgcactctgttttctcaacacggcaaatccgtgaagaaggctcctcagtcctctcgcagcatgaatcgcagtgtcagactgtgcatatccgttagctgtcagctgcctgacaacaagccctacaagcaggcttgacagattctcaatccggccatcttttatcttttgaaatgttgcgtcatataatccgggattggcttcggcgaaattgatataggcatcggcgagagcaagcaaagccgtttcacccgtcagtccttctgcagaggccgccattttttcatataacatagttaaaccggagacagccagctctgctttaattccttgaaggccattgacaaaattgtaaagggaaggcggttttacgtttaaggactttgcaacagccgcaagcgtcacttcattcagccctttttcgtcagcgatgcctgctgcggctctcaatatcatgtcaaggctcattccgactctcggtgacattatgatcggcctcccggcaggcttcgttcggcttcctcagcagcctcagccatcatttcaacgggattgcagagaacatttccatgtccggcggccagactgcttggttgatgagcgataagcgttcttgctgtttttacagcttcttctttattccacgtagcaaaagccggaaacggaaatttccatttcagcttccctgaaacagcaaggccgccccgtacttgaaaggcatctccgacgatcagcatatcatttctcatatctttaaaagcgaggcttcccggcgtatgaccgggagcgggaatgacaagtaaagatccgatccgctcgccgcctttcagcaggcgatcaggttcggtctgaacatttttcggcactcccccctttatcggcgtttgtgcttcatgctcaaataatgaagtgtcacctttcagcaagaaagaatcccgctcagaaatacagacggaagcatccggaaattccgcagctaatgagtcaagcgaaccgatgtgatccccgtgcgcgtgggtgagtaatatgtcattcagcggcttcccaagctgccgcaatgcttgtttgattcctttatgactgttaggcagtccggcgtcaatcagggttactccttcttcttcttcaaccaaataacaattcaccgggaagagcgcgggaaaaaaagtcagctgccaaacggttccgtattgtaagattctcatcaacatccccctaaaaactaatatcattagttttattataactaataccgttagtttttcaagagttttctgtttaaatcctgaaaaaggcgcgggcgcttctcttatgcaaaaaaaagaaacgtgcatactgtgataaaagatgctttcagcctgcgaataaatcagactactaaaaccagccggataagcatacactactcaacggagggggagttccacaccatgcatatcacacttcaaagcatctgccctgtcttaatgattgccttttttctgtataaaaaggtgaaacggtccgtcggctttcagcctttgaaaccccgctggctttatacaagaatgattttgttttcattgctggccgcagctctggcgtttttcagcatcacacacccggctttatacggccatcttatattcggcactttttgcggctggcttctggtcctgtttgcaaaacggaacatttcatttgaagaacgccgcggaaaaatgtattttcgcactcacctgtggattgaacttattctattaacgttattcctatcgagatttttttatcgcgttattgaaatgtaccgggtcacagcggactttacccatccggaggcatacagccaaacggtcggggccgatccgctgaccatcagtatcttttatttcatcgcagtttattacagcggcttctctttttatgttttaaaaacgagcagagaccaaaccaataacagtcagtacggctgacatccctgtctaaaaagcagggatgttttttaatcgtgccgcgtatggtgaatcatttgctgaagcacatctaacacatgttcatcctcaggagaataataaatggatgttccttctctgcgtgatttgacgaggcgcagatttttaagaaaacgcagctgatgagaaacggtagactgcagcaaattcagcttttctgcgatatcatttaccgcgtgctcaccctgtgacagcaaatggagaattctgattctggtcggatcagacagcgccttaaaagtctgggcaaccaaaaataaagtttcctcatctaaatcgacagcggggtcatttttgtttccggattcgtgaaattcagtcatatacctcacccttcttttctcaagtagcccaattataccaaatgtcaattgatgcagatacatcctgcgcctgacaaaagaaccgttattttaaatttatgtttcaaatacgggtttccgcttggtttcgcgcattcatctgtgtcataatgaaaaagtcataatgctcctgaaattgagggtgaaacacagtggagaaaaagaaaaaaggctgtttcgctgccgcgggtcttatgatgatatgtgtttttgtcatggtttccttcttcctcattctgttattttcaaataatgaatggctcaaaagtcttccgtttgatgtcaagccgatcgtccttgaacggctgacagattacaaaccgcttgttgaagacgaactggatgaaaaaggactcaccaaatatacatcgcttgtactcggcatgatatatcaggagtcaaaaggaagaggaaatgatcccatgcagtcttcagaatctctgggtttaaagcgaaatgagattaaaaaccctcaaaccagtatcaaacagggaatcaaacaattcactctcatgtaccaaacaggcaagaaaaaaggcgtagacttggatacgattatacaaagctacaacatgggagccggctatattgattttgtggctgaacatggaggatcgcatactgaggaactggcaaaacaatactccgagcagcaggtcaaaaagaatccgaaactttacacttgcggagggaacaaagacaatttccgttatccctactgctatggtgattacacgtacgcagaaaaagtaaaagcaaaaacaaaaaccgttgaacaatccttaaatgtaacaacacttgaaacgcttgaagagtaaaaggcgccctgatgaggcgcctttttcaatcaatagaaaaaagccgcgcagagcacggctttttttaataatacggtgagatcattaagtatacaatgacacccgtcagactgacatacagccagagcggcatcgtccatctcgcgatttttttgtggcgctccacctgcatactgaatcctctgatcagcgtaaacagcgcaagcggcacgataatgaaggaaaggcaaatatgcgtaattaaaataaagaagtaaatcccgcgcatgatgccgtggccgccgaataaagtattctcagctatcgagtggtacacgacatagcagatcaaaaacagcaaagtcgtcgtaaacgccgctaaaataaagcgtttgtgcgcttgaatgtttttttgcttaatcataaagagcgctgccagcaaaaagataaacgtgaagctgttaaaaatggcatttaacatcggcagaatatgaatattggcaatgctgacctgtcccgatttcggcataaaaaacagcaccgcaattaatccgttgatcagaacggtcaatgtcagcacgacaccggtataacttttaggtttgttttctgtctgattcatcttatgacctctctcaattttactgactatccaaatggtatgagaattcagctttgatgtcaacggtttcgcccgcttcgtcagaaattagacaaacttaagccctaaaaagaccggatgtttgagacccggcctttcgtcatattatgcttccttcaacagttcttctatcaccttatgttcgttttcattcaacagattttttggaatgatccgatcaatcggtttattcatgtgctgatcgagaatatcggctgtttctttgtcccctgcgattacgagacgctcccattggtgtgaagcggccttttgatcaaggtttgaagccaatcgtttatacagcctgttttggttttcttcgacgtgggctttggcggcgtcttcgtccatcgatgcggagcttccgcttacatcctgcggtttccacgattcattgatgacgtcgtaatgataatgctccactccttcaatttttccgagtacggtttctatgatcttcacttcattctgctgggtgagaataaaagccgtgctcggaaattgttcacgaagaagttctaattgatcaaggacagccgtctcttcccaataaaatcgtgtttcgacaggcacctgcaattcaatcgtctcccaaataccgccttctcccgatgcaaaaaatacgagacttcgcggcatctctttaccaagcccctcgatatattgatagacacgttccatgatgcggacgagagatttttcttcttccggatcactggcagacagatactcttttaatctccgaaaaccggttttcaaggcgattttccactctcccccctgctgatccggatttctcatatccgtatttacatataaggaaagcattttatcaggagattccgtcattacgtacttcaatttgccgatgagtgagtcaattgccattatagattcctcctttttccgctgctcactgttcctttccctatccgcaccgccttaaaaacgtcaatccacatataaacggcagacttttctaaaaaagtttttgcaaaacccatttacaaaccaagacatcatttactacaatggatacttgtgtttaactaagacttttacgctgtgaaaggagtatgattttgtttactgcagaagaaagagatcagaaagagctggaaaaagagcttcataaacttgaatttcagattttcagaatgcgggaaaatctgatagatgtatcaaaagacgcgcgagtgcttggtattgatcaatcgaacaatgacgattggatcattgtttcctcgattgatgatggccaaacatgtaagattatgctgactgactgtgagtcagcctaccggggaagaggctgtttttcactgatcgcctcttattatgacaatgccattcatatcggggacattaaaggcccgccgaaccatggctacggctcgatctgcatgaaatttttaaaacatatcgccagagagcagaatatcccgaaagtgacgggcgacatcgctaagcgtgattgggatcatgtcgacagactcattcatttttatgaaaagcatcactttgatgtctggattgacaatgatacgcaatcaggcggcattaaatgggtcgacctgtaaaaaaataatagagaaatcctcttttatatggtgtaatagattaaaccatataaggagggttttttttgtatccggaaaaattgaaaaaaggtgacggcattcgtattgtgtctccggccacaagcatgtccgttatgtcagatgaaaatataaatgccgcgaagacaaaattggaggagctgggcttttgtgtctctttttcagagcatgcgaaagaaataaatgaatttgattcatcatccattgaatcgcgtgtacaggatctgcacgaagctttcgctgatcctgacatcaaagcgattttgacgacactcggcgggttccaatcaaatcagctgctccgctatcttgattatgaaaacatcaagcggcatccgaaaatcctttgcggctattcagatattaccgctctcggccatgccatatatcaaaaaaccggccttattacatattccggtccccatttttcttcatttgccatgaaaaaagggctggactataccattaactctttcttggcctgctgtgcttctgacagcccgtatgaggtaaagccttcatccgagtggagtgatgataaatggtatttgaaccaggaggacagacgtttttatcggaatccgggaccgctcgttattcaacccggatatgcggaaggaacactgatcggaggaaatctatgcacgctgaatcttctgcagggcaccgaatactttccggagatggaacaagtgattctgtttatagaagatgatcatatgtcggacattcatatgtttgaccgggatttgcagtcactcatccatcttcccgctttttcagccgtgaagggaattgtcatcggacgtttccagcatgcttcaaatgtgtctgaggaggctctgcgtgccgtcatccgtacaaaagaagaactgtcatccatgcctgttatcgcaaatgctgatttcggccacacctcccctttgatgacattcccgatcggaggaacatgcaggatagaagctggctcagaaggcggacggatatggatcgatcggcattaatacataaagacgggaaaaccgccccgtctttttattttgacgccttatgccgcggcgtgcgcggagcgatcataatttgtccgccagccgctgccgttacccatacggaagctccttcataaaaatggctgatctcttcattatatacggcgtgtgtcagttcacgtttatcatgcgttccgtcttggttttttacgtttaaaataagcacaagctcgtgcctgccattcttcatcacgccagtatgtctcaccttttcaataacggctggccttcctctccctctgtcaagcgcctgaaacagcctgacagcaggcatagacagtccgataacgagcacaatggcgaaagcggtgcatatacctgcttgaaacaccggtgattctgtgaaggcattccataaacatataaattccggctccatcagattcatacatcccttcagattccgttttcacatccattccttattatattagagaaacgctttttctttttccgcatataacgattatatacagtcaaaaaagggaagaaaaaaagaacacaaagcatttcgccttgtgttcttcatctctatatgaaactagtctaatactttaacatttactgttctgacgccccagttgttagcgtcacttttctttgcaacaaatacgtcaattttatttcctttaattgcgccgcctgtatctgctgctgttgccactccgtaaccttcaacataaaccttagagccaagcggaatgacactagggtctaccgcgatgacttttgcatcagggtttttgtttaagtcaacaccggttgccgttacaccggaaatgccgccgtcgttagcagagtaagcagttgcagtcattgtcagctgctttttaggctcttgttggtttgtatttgattgaacaggctgctgttttgcttcgacagccttcgcttcttgtttaggttgttgttcttgaacaggttcttgtttaggctgctcgtttttgacagcttcttgtttcggctgttctgtctcggcagctggtttttgttcagtttgcggctggctggcttcttgagccggctgtgcagcctgagcctgacctttcacatttaacgttgtgcctgcgtaaattatatctgattgcaagttattcaagcttttcagattgccgactgatgttccgaatttctgagcaattttccagaggctgtcgccctgcttcactgtgtactgcccagatgtggttgtttctactgaagaaatagtcagtttctctccttcaatgattaaatcagaagataactgattccattcttttaagtcctttaggttcactccgtttttttgcgagatcccccagagcgtgtcacccttttgcaccgtgatttctttagcagaagcgtgagctccaaatgcagttgttgaaattgctgcaactgcgacaaaggacataatcgtcttcttcataagtaaatcctcccttgttagctttttattggcggctaacaggtgatatcgtaacatatgaaaatgtcagttcaataacaaaacgatttgaattagattacagttcctttacatgaaacatttctctcgcttggtaagtcttgctgaaaccttgatacagcaagggttttcaagcttctgatttttccggcgccaatgaaaaacacaatgtgcaaatttctaaaaaaactttttttcactctgtttctcttacataatttcggatttcttctaaaaaaaccgctccgtatttcaatcttttttgttccccgaccccttttacggaaagaagatcctgatccgttttcggaagtttcgccgacatttcttttaacgtctgatctgagaacacgacaaatggaggcacaccctgttcagctgcaatttctttgcggagacgccggagaagctcaaataattcatcattctcggtaacggcggcggcctgtaaggcttcttttctcgcgactgcgctttttccaagcagaacgtccctgcctttttgggtgaccataagcgtcggaaatgtgccgtccgccattctgatatattcatcggaaataaggaattcgataaaatcactgatttccgctgcggattgatgcttcataatgccgtaagtggacaggctgctgaagccgttttccagcacttttttattttttgacccgctaagcacctgcgccaccatcgtttttccgaagcgctcattcattctgatgatgcatgacaataccatctgcgcttcttttgtgacgtcatgggcggtccttgtatcagtgcaattgccgcatgctccgcaagcttccgcctcatcctcgccgaaatacttcagaataaaccgctgcaggcaatcttccgtatgacagtaatccaccatctgtctcagttttttgagatcctgtttttgtttttcttctccggcggccgattggtctattaaaaaacgctgcaccataatatcctgcggcgaaaacaagagcacacactcgctgttaagaccatcgcgcccggcccgtccggcttcttggtaatagctctccatatctttcggaatctgcgcgtgcaaaacgaatctgatgttgctcttatcgattcccattccgaaagcggacgtagctaccatcacttgtatctgatcgttaagaaaccgctcctgctggtcttttctgtcatcatccgccaatccgccgtgataacggccggcattgatgccgctgcgttttaatttctcatataaacggtcggtttcttttcttgtcgctgtatatataatgccggcttcgtgtttattcttttccagataccgctcgataaaccggtctttgttttcgccctttactactttaaacgttaaattctctctggcaaaaccggtatatacagtttgttctttcttaatatgaagctgcttgcagatgtcatcatgaacctcaggcgtagccgtcgccgttaatgcgatgatgacgggcggttcttttaattcattaaaaaggatttcgatattccggtaactcggcctgaaatcatgtccccattgcgatatacagtgagcttcgtcaatggcgacaagaggaaccgtaatattctgcaggatgtgaatgaattcagaagaagtcaaacgctccggtgtgatgtaaaagagccggtaagccccttgtttcaaaccggtcaggcgctcatgaatgtcacggcttgtctgggtgctgttaatataagctgccgcgatacccgcttcttcaagcgcgtcgacttgatctttcattaaggaaataagaggggaaataacgattgtggttccttcaaacagcagtgcgggaatctgatagcagattgattttccgccccccgtcggcataatgcagaccgtgttttttctctcctctgcaactgattgtatcgcctgcttttggcccgcgcgaagactgtcgtagccaaaataatgcgccagaagggattgggctttctccagcatatcttgtaaaacctcactttgtctttgattcttttattttatcatactgataaagtacgctgctcaagggaaattcaaaataaaaagccatctccgcaagggaaatggctttcgctacgtatgccgtacgcaagtaagaaagttttaaaccaccactcctcaaagtgggtgtttgcagaagcgttcctgtcgtcctctgcaatggaggcatgacattccggcttcgatataaaactccctattacagcttaaaggttaaaacttaattaacaatacgaacaatgtagcttctcttatatcctacaccatcagtcgtattttggcaagagggttaattcttttacagaaaaccttttttctttgtgaaaaatgctttattctacataaaaattgttttttcgacaaaatatcaatatatcaatataagatcagatcaaaagcagccgccagtttcttctataatagaaaaaactctcacaccctgtaggggcgcaagagttaatggaaattagaattttgcagccagatctttcgcttcttgcagtcctttttcaatgatcgcttgagcgttatccggtgcagcattatggccttcaacgacaacagtgtgaagatcttggacaccccagaaaccgagaacggttttcatgaagtttaatgacatttcaagagatgccatcggtccttcagaatatacgccgccgcgtgcgtttaagagcgctacttttttatctcccatcagacctttagggccttcaggcgtgtatgtgaaagtaactcctgcacgagacaggtaatcaacataagtatgaagcacagcaggcactgtgaagttccaaagcgggaatgcaaacacgactttgtcagctttgacaaattgatttaagtaaatgtcagcagttgacgcttgttttttctcttcgtctgtcatttcaattccttttgaagctttgaatgttccgttaatcatatctcttccgaggtaaggaaggttttctttatgaagatcaagttcgatcacttcatcattcggattgttttctttataagcagccagaaacgcttcgtataattttacggatacgccttcttcagccgtacggtcacttgattttacaaataatacttgagacattctaaattcctcccggtaatcttttaatatttacttacaaatagtatgttactttcttttttatataaagtcaatgattttatttcgattttgagattttttatggaataaaaaaacaggtacatatgaatgtacctgctgctattattgtgaatcctgctcgcgatccaggatttcgtatgtttgtgagcttttttgatcaacggtttctttatttgagaggtctttcacctgctcgtgaaattccctttcatatgacggagcgtctgttttcacatccccttctgtttctcgctgcgcttcgacggtcattctggcgtacggcacggcttcaagtctttcataaggaatttcttttcccgttttctcgcaaatcccgtatgttcctttatccattcgttcaagcgcggcgttcacctcatctaaaagattctgatcgacaccgtccagcgtctgattcgtgaccctgtccaaataaatgcttccgtgatcagctaagtggttatctactccgttcgacagttctcctgtgtcttcactcattgaatgattttcttttgattctccctgaagactttcctttaaatcgattaatttatgataaaggctgtcctgctgtacttttgataatgacatattcatcatctcctttttcgtctgtattcttcgctgtatctgctaatacataccctcgaaaaaggaggctgaaacaacggggtcaatgctttctccccctgatggtgacattgggtgtctgctgctttgtctgtcttttttctttcgcagcatcagtttgcgggttgtcccgaaattcttcagcgcaggcttgtttgagcctgtgcgccggtgtatggtaagtggcgccgatattcagcataccgctcagctcttctatactcagcttttcaaaatcaatattgtattcaaccttgtccactttgacgtgctcaatatggacatatgttttttccccttccaccgtctgcggctcaaaatgacacttatcctgaagctcatcaagctgttgttccactttcttaagccggtctaattcctcttcacacacttttttgaaaatctctttcattatttttttcaaaaaaaatcacttctttccccgtcactcttggaaagttctatgcgtcccgcattgcgaatatataaacatgatatacaaaaaggaggcgaatcatgatgttttttccatccgttatcaattttgagtatataaaaatgaacggaatcagcggcggagcaacttttaacaccggctcttccgttatggtgagaaacacagcagccaataaaagaaatgaagggtacggtgaacaaaacggtgattgcaccgttgtcgtcatccctatcatgagtatcgatgattcagatctgatagatggcacagcaaacaagatcagccttcgataatgatctggcttgcatcccccagatgtttagcaatcgatatatataaaatcccgtctttgaataccgcctgcattcccttcgttccctgagcggaatgcggaaggtcgagttttttttcaaaatcgccgtattttccggtcttctgtttaaaatcctgttcattgaaaaaggattttctcgtgccttttacgacgatatattctccgtaggacagcagctgaacatcttgtttccggtagccgggcagatacagtaaaaattggagctcatcatgggtttccacaatatctataagaggaaaagcatcctcatttcttttcatttgcccatctccctgttgaaagggaaaatgagaatggccgttttgaaatgatttcagttgttcatcatcaaaaacgtttttccaaaagtcgccgccggacatgttttgcgccatttccatccactgcttcatcttatcgaaatccatttttatcgcctcctgtctaagcatacggtcataacagccggcatacacctgtattaaaggaggtttgcctgtggttcaaccaactccatatatcaatattaatattttcatgttgaaaattaattcctttgaaaatgcttcagcggtgaatgtcggacaaaatttactggcggaatggcagaattctgataaaaagaatcagggatacggacagaacttcggagatgcaagcggcttcatcggcacgaacggcaaagtggatgaccgggatcaaattgattctccatctacctttgagtctgcatgcgataaaatccctgccggaaaaggaggcccattatgatgttttcgccggttttggtaaatgtaggaggctttaaagtaaatgcagtcgaccgcggttcttccattacgatcggcccgtatcagcaaatcgattattttttatccaataagatcaactacggattcggtgaagaaaatggtgatttggcgccgatttatatccccatcagttctattgctgatccggatctcattgattcgaactccggaaaaacaagcattatataataaaaaggccatccgcatgcattcggatggcttttatgtgatatttaactgcataagtattttgttaagatggcttgaacctcagtcaagtccgtttcttttgcaaattccaattcgaaagtttttccccttgtcattaatacaagcccggtatctggatcaaacatccccgcttcttgaatggcgaagctttcaattgttttatatggaagaaatacgcgcactttctttttggagaacattttattatcaaagaaaatcactcgtttattcgtaaagcatatttggtcaacccgcagtttataaatcgtttcgatccgttctccctcaacgagcaaagcctccagcttttttgtgtcggttgatctgctgacagaaaaaattcccaatgaagaaccccactttctgcttctatactattgttttattacaatcataaaaaaataagttctttatccctatataagaatacgacatagacggcatttaaaccattacgaacagattacatttttagaacgttcatcaaaaaagcccttcgcgaaaggtgccgctgttatgaagtagtacggttcagcgaaagaaaaggtttcaagaaaacggtatttttttcgaaaagtcagttttttattctcgccataaaaaaccgcggcttttccaatgccgcggtttcaacaaaacatcaacgatccgtatcttcaatcgttccttctttataggtatctgaaatttgttccatcgtcgtgtcggtgccttcttcaggttgcacttgctggagctgatctgatgttttattttgtttgtcttgctctgtttttttcattttgcagccaccttttatatgtagtcttttttagtatggctcaggcaaaatgaattcattcagctttaaacttcttcaaaatactctttgtagaagcctccgactttgtttgtattgtctacaacaaaaatgaattcttctgtttcatttttgacttcatactctttacccggcgtcagcacatttttgacaatgtattttttcgcatctgtatgtacgcatttgacctttttgacgctttcttttgtctgccaattattatgaatcatttataaaactccttttcttaatcgataagcttattgtagccgttttttcttgtgaattgcaataacggttatcgattgattttaccggaggtgttattatagaatgactgtatgcgcttactttgcgcggacatcaagatgctcaaaacagaccataaaaaaatttcgggaggtttgttacgaatgagttctttaacgatgcagatcacaaaaaggctggaaacatttttacagggcacgaagaaactttatattgacggaaaatttgttccgagcgcttcaggatcaacatttgtcacaccgaatccggcaaccggagaaacgctgatgacgctttacgaggcacagtcagaagacattgacagtgcagtgaaagcggcacgcaaagcctttgatcacggcgaatggcgcactatgccggccgcttccagaagcaggctgatgtataaacttgccgatttaatggaagagcacaaaacggaactcgcgcagcttgaaacacttgataacggaaaaccgattaatgaaacgacaaatggggatatcccgctcgcaattgagcatatgcgttattatgccggatggtctacaaagataaccggacaaacgattccggtcgccggctcatattttaattacacccgccatgagcctgtcggcgtcgtggggcagatcatcccttggaacttcccgctccttatggcgatgtggaaaatgggcgccgcccttgctacaggctgcacaatcgttttgaaaccggcggaacagacaccgctgaccgccctctatttagcggagttaatagatcaggcgggcttccctgacggcgtcatcaatattgtcccagggttcggcgagacggccggggaagcgctgaccaaccatgacgatgtcgataaactcgcttttaccggttctacagaaatcggcaaaaaaatcatggaaaaagccgcaaaaaaaattaaacgcgtgacactggagcttggcggaaagtcacctaacatcattttgcctgacgccaatttgaagaaagcgattcccggcgctttaaacggggtcatgtttaatcaggggcaggtatgctgcgcaggctcccgtgtcttcattcacaaagacaaatatgatgaggtcgtcagcgaaatggtttcatatgcgaaatcgcttcagcaaggcgccggccttcaccaagatacacaaatcggcccgctcgtcagtcaggaacagcatgagcgcgtgctttcatatattgaaaaaggaaaagcggaaggagccaaagctgtcgcgggcggcagctgcccgtttgaagaagggtattttgtctccccgactgtatttgcggatgtggatgacagcatgaccatcgcaaaagaagaaattttcggccctgttttagccgccattccgtatgatacggtagatgaagtcattgagcgggcgaaccgctcggaatacggccttgcagccggactttggactgagaatgtgaaaaacgcccattacattgctgaccgtctccaagccggcaccgtttgggtcaactgctacaatgttttcgatgcggcatctcctttcggcggctataagcaatccggcctcgggcgggaaatgggctcttacgcgctgaataattatacagaagtgaaaagcgtctggatcaatctggaagattaaatcaaacaagaaactgctgcctgtcagcagtttctttcttttgtcatgccgacttttacatatgaatatatatgcttctgaaggagttgagcgagtgtgagcacaattcatgaaaacgtcaaaagccgccaaaagaaaaccatctctctattaagagaaacgcaaaatgcgaacggctcatggtcattttgttttgaaggaccgattttgacaaacgcctttctgatcctcctcctcacttctcttggagacaatgataaagaactgatcgctgagcttgcagaaggcattcgcgctaaacagcgcccggacggaacttttgccaactatcctgatgaccggaaaggaaatgtgaccgccactgtacagggctatgccggcttgctggcttccggtttatatagccgttctgaggcgcatatgattcaggccgaacgctttatcatctcaaatggcggcttgcgcaacgtacacttcatgacaaagtggatgcttgcggcaaacggcctttatccatggcccgcgctgcatctgccattatctttcttagtcattcccccatccttcccgctgcatttttaccagttcagtacatacgcccgtattcattttgtaccgatggccgtgacgcttaacaaaagattttcgctgaaaaatcccaacgttccgtctctcgcgcatttagatcggcatatgactaaaaatccgtttacatggcttcgttccgatcaggatgagaacagagacctctcttctcttttcgcgcactggaagcggcttttgcagattcctgccgcttttcaccagctcggtctgcgtacggccaaaacgtatatgcttgaccggattgaagaagacggcacattatacagctatgcgagcgccactatttttatggtgtacggcctgctcgctctaggtgtatcgcgccactcccccgttatcagaaaagcacttgccggcacgaaagctttgctcacgtcttgcggcgatataccgtacctggaaaattcaacgtcgaccgtttgggatacggcgcttctcaactatgcgcttatgaaaagcggcatctcagataacgatcagatgataaccagcgccgcccggtttctgcgtgaacggcagcagacgaaagtcgctgattgggccgttcacaacccgcatgctgaaccgggaggatggggtttttcaaacatcaatacaaataatcccgattgtgatgacacagccgcagtgctcaaagccattccgcgaaaactttatcccgcctcatgggaacgcggactgagctggcttttgtccatgcaaaacagtgacggcggcttctctgcttttgagaaaaatgtcaatcatccgctggtccgcctgctgccgctggaatcggctgaggaagctgccatcgatccctcaacaagcgacttaaccggacgggtgctgcactgtttaggagaagcggggctttcttctgatcaccctcagattgaaaaggccgtccaatggctgatccgccatcaagaagaggacggatcgtggtacggcagatggggtgtctgctatatttacggcacatgggcagcgctgacaggaatgaaggcttgcggcgtgagccaaaaccacccggccgtgaaaaaagcgatccgctggctgaagtccattcaaaacgaggacggaagctggggggaatcctgtaaaagcgcagaagagaaaacctatgttccgctttcttacgggacgcttgtccagacggcttgggcggccgaagctttgctgcaatacgaaaaaactcatcatcaagccgtcacaaaaggcatatcttttcttattgaaaacaggcattacgaaggcgccgctttcagctatccgaccggaatcggcctgccgaaacagttttacatcaggtatcacagctacccgtatgtgttttctttgcttgcgctcagcacttttatgaaaatgagtgaaaaggaggaagaaaaatgaaacggcacgcttatcaaaccgagatgctgaattggtgtgaaaccttgaaggaacaagttattcagcaaggtcggttcgatcgcttcgcggcacaaatcgaccggatttttcacacccttcaggatgatggattaacggaggcggaatggtacgaacaggcatcggcactttaccgggacattactgaacccgaagagcccgatgagcgcagagcttatgtgccgatcggcaagcatgtcctccctaaactgccttacagttattccgcattggaaccgtatatttcaagagagattatgaaacttcaccataccaaacaccatcagagctatgttgacggtctgaataaagcagaactggagctcaaaaaagcgagacagacgaaacagtacgacttagtggcgcattgggagcggcaattggcgtttcacggcgcgggccattatttgcacagtattttctggttttcgatgaatccaaacggaaaaagacggccgacgggggcgctctttcaaatgattgatgtgtcattcggaagctactccgcttttaaagagcaattttctcaagcggcgaaaaaagtcgaaggagtcggctgggctatcctagtctgggcgccgcgcgccgggcggctggagattttggccgctgagaagcatcagctctacagccagtgggacgtcattcctttgcttccgctggatgtgtgggaacacgcttattacttacaatataaaaacgaccgagcggcttacgtggatcaatggtggaatgtcgttgattggcgggaggcggagaaacggttcgagcaagcgcaccgcgtgatatggccgctttattaaaaaagcccccgtcttgaacgggggcctgcttcttttggtttaaaaaataccaaggacgtgcagaaaaacgataataatggctacaggagccacataacggattaataggagccagactgcaaaccattttcgttttataccggaaccgcttttcagttcgtcaaacagcatctgtttcgggattttcaacggtacgaaaacggcaattaaaagcgcgcccagcggcattaagacattgctgaccagaaaatccgcagcgtcaaaaatactgcggtgaaaaatagaaacatcactcaaaattccgtacgacagcgccgaagggaccccgacaataaatatagcaagtcccccgatccatgcataacgcttccgttttgccgaatcgccttttgacaaaacagcaactaaaatttcaagcattgaaaaagccgatgtcagcgtcgcaaataaaaacagcagcaaaaaggcgagcaaaaacacgatgcccaacggcatttggttaaagacggtcggcagcacgttaaataaaagctgcgggccttgatccggcttgaggccgaatgcaaacaccgccggaaaaattgccactcccgccatcacagcaacaagtacatttaataccgtcaccgatacggcggattgaacaatattttcttctttttctaaatatgcgctgtatgtaaccattacggacactccgacgcttaacgagaaaaatgattgtcccatcgcatataaaatggtattggcatccatcgcgccaaaatcaggcataaaaaagaattttaatccttttgctgcatcatgcagcgtaacggagcggatcattaagagaataaacagaataaacagagccggcatcaacacctggctcactttttcaatgccgctgctcaccccttttgccacaactaaaatcgtcagcacgataaacagcagctgaccgaaaacggctgcataaggatttgaaatggtatcgataaataacgtatcaaatcccgaagaaagcgataagccgcccgtaaagccttttataatgtagattaatatccatccccccactacgctgtagaaggataatagaataaaacacgtaataattccgagatatccgatccagtgccactttttccccggcgcgagcgccttataggattcaacggcgtttttttgtgtttttctgccgataataaattcagcaagcaaaagcggcagtccgattaaaacagtaaataaaataaaaacaagcagaaaagcgccgcctccgctggttcccgctacgtaagggaacttccatattgcgccgagcccgattgcagagccggccgtagctaaaataaatcccagcttagatgaccattgattagcttctttcacttcagcactcccaattcatttcagtataaaaatcaattgtaagaatatatgtctgaatagtcaagaagatgttagtttacataataattttattgaaaacttatatttaatattgaattattcagaaaattatttataatggaatacagaaaagtcagtcatattttctgactgattgaatgtaaaaggagctgtgtttatggaatggctgaaaaaaataagcgggtttgcgggccaaacctttggcttgtgggttatcgtctttgccggtttaggattcgcctgccctgatttgttttcttggatcagttcttatatgacgattttccttggtattattatgtttgggatggggcttactcttcaagcaaacgattttaaagaattaatcagaaagccttggcatgtcgtgatcggagtcgctgcccagtttacgattatgccgcttacggctttctgtttatcaatcgggctccgcctccccgcagaaatcgccgcgggcgtcattctggtcggatgctgtccgggcggtacggcatcaaacgtcatgacgtttttggcgaaaggcaatacggcgctttctgttgcggtcaccacgatctcaacattgcttgctcctattgtaacgccggcacttattatgctgtttgcgaaagagtggctccccgtttctttcggctcactgtttgtttccattatgcaagccgtgcttttgccgatcgtcctcggggtgattgtgaagctgttcttcaaaaaacaggtcggacaagccgtgcacgcgcttcctctcgtgtcggtaatcggcatcgtagcgattgtatcctctgtcgtcagcgtaaatcgtgagcatttgcttcaatcaggactgctgattgtgtctgtcgtcatcttacataacggaatcggatatttgttaggattcctgactgcaaagctgttcaaaatggattatgcttcacaaaaagcgattgcgatcgaagtcgggatgcaaaactccggactgggcgcagcgcttgcgacagcgcatttctcccctttgtcagccgtgccgagcgcaattttcagcatatggcacaatctgtcggggtctgttcttgccacctactggtctaagaaaaaagagaaaaacagcgccgaagaagaagaagaaacggcaaagattccgttttcataactgaacaaggataggataggctgctgccgctcctatccttgtttattctgcagatcacgaaacagacgcaaaagcgctttttttacatccccctgaaataaacctccatgataacaaatcaattggcggatatcgtaatcgagcagccgctgcacagaacggaccgcatcatccatatgtaacgtatagccgggattagcaaggtttagctttccgtcttcaatgacgaccgcatcacctgtgaccatagttttttcggcaggcagataaagactgatatggccgggtgtatgacccggcgtggctacaacgcgaatgcctccgcaccaaggcagcagctcgccgtcagtaactgtccggtgaactggagccgattcgactgattgaagcgagcggatgaactgttttgcatatggttttgcatcctctggcaatgaacaaaacgttgattcagcctgctcaagccgtaaagattttttagagccgtcaatatacggcgcttcacgctcatgtactgtcacgctgacatccgggtgcaaacggtgtaatgcagcgagtgaaccgatatggtctatgtcgtgatgcgttacaatgatttttgtcaatgaatgaagcgacattccatgccgggcagcagcatgttgaagatggtttgtagaaccgggatatccgcagtctattaatatcgtgtcatgttcgtcttgcagaagtaccggagtgatagaatgcaattcttcattatattcaaattcgatctcaagcggatgacagcttttcatataaattctccccttctctcaataaaaaaagtacactgcttgtaagggcagtgtactttttgtctgtctcaaattatccttccagcaacagctgttccggatcttcaagcaggtttttaatggtgacaaggaatccgaccgcttctttaccatctacaattctgtgatcgtatgataaagcgatgtacatcatcggacggttttcagagcgctccgcatcaatcgctactgggcgcagctgaattttgtgcatacctaagatcccaacctgagggctgtttaggatcggtgttgacataagcgatccgaatgtacctccgtttgtgatcgtgaaggagcctccttgcagctcacctaatgttaatttattgtttcgcgctttcttcgcaagttcgccgatctctctttcaatgccggcaaacgtcaggcggtcagcgtcacgcacgactgggacgacaagcccttcttcagccgcgacagcaataccgatgtcatagaattttttcacgatcagctcatcgccttgaatttcagcgttaaggagcgggaattttttcaaggcagccacgacggcttttgtaaagaacgacatgaaaccgagttttacttcgttttgctcaaggaattggtctttacggcgttttcttagattcataacggccgtcatatcaacttcgttaaatgtagtcagcatcgcagaagtctgctgcacttcaaccaatcgtttcgcgatcgtctgtctgcggcgggacattttttgcacttcgacaggtttgtcaaagctttgctgtgtttttggagcctgctgtttcggctgtgccgcaggttttgaagccggtttttcataagcttccacatcttgtttgcgcacgcggccgagcgggtctcccgtcggaatttgtgatagatcaattcctttttcccttgccagcttgcgtgcagccggagacgctaccgttctggatttcgcttctgattgtgcttcctggctgacttcttgtgcagcaggttcagcttttgcttcctctttcgtttgttcattggctggagcactttctgaaggggcgggtgcagaactatcgccagcgccttctgtaatggtaccgataatttctcctacttggacggtatcacccgaatctttcaatacctcttttagaacacccgattcttctgctgtcaattcaacatttactttatccgtctccagttcaagcaagtactcaccctgttctacataatcaccgggctgctttaaccattgggctatcgttccttctgagattgattctgctaattcaggtaccttaatttccgccattttttcatttcccccttagtttttgcgagtcaagctatcagatacaatgcgttcctgttcttttttgtggactgtcggatctccttctgcgggactggatcgtcttcttcggccgatgtattggacatttactccttttggcgcgatttccgtcagatacgggctgatataactccatgcccccatgttctgcggctcttcctgaacccaaacgatctcttgcaggttcggcagtttggcgaaaagctccttcgtatcttttgccgggaacggatacagctgttcgattctggcaatatgaagccaatccttatcgccttccattttgttgaagtgatcgctgatatcaattgacacttttccgcttgataatacgacgcgagtcactttttcgtaagcatgggaaagaccggactgctcatagacaggcttgaatcggctttcgctcagttcctgcacttcagataccgtattcgggttgcgcagcaggctcttcggcgtcatgatcacaagcgggcggatttcctcacgaagcagcattttcgcttgtcttcttaaaatgtggaaatactgagccgcacttgtcaggttggccaccgtccagttgttttccgccgccagctgcaggaaccgctcgacgcggccgctggagtgttcagggccctgcccttcgtaaccgtgaggcagcagcatgaccagtcctgatttttgtccccattttgcccgtcctgcagatatgaattgatcaaaatagacttgagccgcattagcaaagtccccgtactgcgcctcccacatcacaagcgtttcaggcgaatacacgttgtatccatattcaaagccgagaaccgatccttcagagagcgggctgttatgcaccgtaaatgaagcagcgcagtcgtctaagtgatggagggcaacaaattcttctcctgtttcgctgtcatgcagcacaaggtttctttgagcgaacgttccgcgttctgaatcctgtccggtcagccggatcggcgtgccgtctttcaaaatggaagcaaacgcaagcgattcagccaatgaccattcaactttacggtcatcatcaaacgcttttgcacgtctttccaggattcttttcagcttgccgaacacgttaaaagattccggccagttgataagttcgccgttcagcttgcggagaacatcaaaatcaatggctgtgtcaacgtctggaaaaccgttggacaccggttccggcaattcaatttcccgtacggcgtcttcttttttggcgggcacctttttataggcgtcttcaattcgttttgtcactgccgtttcgatgttttgcgctttttcctcgctgatcagtccttcacttacgagtttttccgcaaagatccgcttgacagtcgggtgttttctgacggcttcatacagcatcggctgtgtcgttgacggctcatccatttcattgtggccgtaccgtctgtacccgattaaatcgattaagaaatctttattgaaccgcttccggtattcaaccgcaaatttaacggctgacaggcatgcttccggatcatccgcgttgacgtgaacgatcggaatttcatagcccttcgccaaatcactggcatatttcgtggatcgtgattcatcgctttcagttgtaaagccgatcatattattggcgatgatatgaatggccccgccgacctgatagcctttcagagagcttaagttcagcgtctcggcgacaatgccttctcccggaaacgctgcgtcaccgtgaattaaaatggcgagcgattttgtttcgtcttgaaccgggtaccccttttgcgttcttgtttcctgtgccgcccgcgtgcttccttcaacaatcggattgatgaattccaaatggctcgggttgtttgcaagcgtaatccgcgcgcttttggtttcagcatcctgaagctgtctgtctgcaccgaggtggtattttacatcgcccgtccagccgtagctgatgccggtcgatccttcagacggcacaaggtctttattcggcgcgtgctggaattctgagaaaataatctcatacggtttgccgagcacatgcgcaagcacatttaaacggcctctatgcgccattccgatattgacattggttgtgcccgctttcacagactgggcgataatgtcgtcaagaaccggcacaagcgcgtctaatccctcaattgaaaaacgcttctgaccgacgaatgtccggtgtaaaaattgttcaaatccttctacttccgtcagtctttctaaaacggctgacagtttttccggtgaatttttccggaacagttctccggattcgaccatttttgtaatccatgcgcgctcttcgaaatcatgcacatggtcaaactcgaaggagatggttcttttataggtattgcgtaaatgctggatggcttctaagccgtttgttatattggcaggtgcgtctttacagatgacagacgcgggtattgctttcatttcttcttctgtaagcccgtactcggataacggaaagagctcgctctttttcggatcctttctgagcggattgacggaagcgttcagatggccataggttcgaatatcttctgcaagtttaactgctgctgcgatcttttgaatcagatctgcggtgacgcgtccctgttcctttgtacccgatgcctcttttatttggcttggcggagcgccgagttcgtcaaacatgtctttcagatccggatcaatgctgtctggatcttcagcatattggtcgtacagctccagtgcgtagccgaggttcggtccgtaaaaatcttcccaattcattctttgtttcatattattttgaaacatttgaatattacccccaacctagataatcaagtgatcaattcactatcttgaaataacttttgaacgctgtgcccaaaattatgtaataaaaacgcttccaaggatattttaccactgattgcgtttggattctaccttgattgttcacaaaatagtaaaaaaaacagatcaataccgaaaaaattaaatcattttaaaataaaaagcgaaaaagcataggaaaaagcctatcctatgcttttatgaagcagttttttcaagagcggatacagcacatcgggcagctgatcgacatccggaacaaaaatactgtactttccgtacatatcctgaatggttttcatctgtgattcctctattgcagtattggacagaaaaacatttatgacttctatccctttttttctcgcttcgatgacagcctcgctcgtatcgacgatgccgttttgttcgtatccgaatgctgccggctctccgtctgaaaacacgattaaaaatttttgcgcctcactccgccgcatcagctgtttcgtcatttgtctgatggcgtatccgtctctgttatcttcttcaggcgcaagctgcatgatcagcggacccgccgcctgcagcagcgactcttcaaacggaatgacggtattgaagaaattcggctggctcgtttcggtcgcttcgttcgtatcctcccaaaatccgacgatctggtgcggtacggacactgatttcaaggcttcatgaaaaagaacgatccctctttttgtttcatccattttgtcgaacatgctggccgaacaatcgacaagcaatgtaaaaacggcgtcaatgtctgaagacgggtcctgctttttaaagaaaaggcgcgggttccgctccgtaaaatagcggatcagtttgcgattcagccggcctgcgtgaaggtcggtccgcgggagcgtctttttgtgctcaagtgttttttgtatcatctgcttcaggcgtttttgatatgattctatcgtttttgcctgttctttataagactgctcctcttcaggagacgctttatgaggcgtttgataaaccgggaaggcaaatttgttttcttttccgtcagccagccccgcgccctcatgttcatcctgaatggattcaagcgcttccagtttggagtaatcctctcttttcgtctgacgtgcggaaccttgaacggagccgagcgcctggtcaccgtcatcgccttctctggccgcgtctttcccaagatctgatttcgcgccgtgctcaatatcaaattgaaggaaactttttgacggcgcttcggtttcccggtgccacgtattcattttctcttcaaggatttcttcatctccgtcggaagactcagggagcgtgagatcgtcacttaacgaaggcgctttttttacactttcgaataaaggctcttcagccgctttttcgtaatcaagttccggcagaaaaaagtacgtgttcagcatatctttctcaagcacttcatcaaggccttccatgaggtcttccgttatttttgcgatttgttccgtagaatccgcctcatacacccggatgagctgacgttcaatatacggtatcatcatatcaatatgttcatgcatggaaggaatgccttcaagcggagactcagccgtcagcttgacaaacatcgcgcaatacaaagcgtcggtgaaaatgctccgttctaaattcaatgtcagctgcgtcgtgaaatatttcctgtacatctccctccgcttctgaaaaacacgtttcgttcccggccgttcttttttgatcagctcttcaattctgatatcctcaagcagcataaacagctgcttggcaaagctttggcgggtgaaatgccggtgaacgtcatttaaaaaccccgcaaattcccgaaatgagctgctgcgtgttccgacagcgcgcaaatagacatcgcttttcaggccggcttccatatccccggctgatcggtctttccaaaagtggctcatgtaaattttcttttcaaagggattgtagtaagactgcacgccgtattccacttcaacttcactgcttctggtcagtgttttggccagatcagtcagcatcatgaacaaaaacgaatcaatcgtgctgtcattaaatttgataaacttcattgtatatccctcattcgaacagcgtttctgcaatatttctgacagcggctttttccctgtcgtcgtcaagtttttctacgatgcctctttcaatcgcccgtttcggcgggatgtacgcagccaagtcgcacgtatcaatgagagccctgatggacgccgcttcttctgacacttgtccgttatgcgcttgtgcgattaaatcagaagacagcgtcataaagcgctcaattaatttctcatcttttaagacagactgagaggtcagcacctgcttcaggaggcttcctttaatatacggaacatcaatgatgacaaaacggtttttaagggcttcgttcagcggaacggtgccgacgtagccttcattaatcgcggcgataacaccgaatccttcgcttgccttaatcacttctcctgtaaagggatttgtcatcatttttctgtaatctagcacgccgtttagaatcggaagggtttcaggctttgccatattgatttcgtcaatgtataaaaaatgtccctcgttcattgcggttgttacaggtccgggaacgaattcaattgtcgcctgtccctgttcattttcaatcgttttatagccgacaagcgcttctgcatcgaggtctacggagcagttgacgctgtgcatcggtttatgaaaatagttcgaaagcgtttccgccaattttgttttccctgaacccgtcggtccttttaataagatattttttcccattgtcaaagcaatgacggcatcgaatacaatcgctttatcttcggcctcatagcctgatgatccgattaaatcccggaattcttgggaaacgggatgattttgataagcctgcagtttgttttgtatatcttccggaagtgataggtgctgtaattctgaagtcataggtgatgtttcctttccatttgtattccataaccgagtatactaaaaaagcccttgtatactcaatacaaaagggctcattccctgcgggcgctttttgtcaggggagcgcaggcgattctggctccggaatttccgctcgggtttgtcaaataatcgtccgtatgttcatgaatgacgaacgcgcttccgtcccggtcgagcaggctgagtctgctcccttcttttaatgaagtttgcggcgcgttcataatgacatccactttaccatcagcccccacttcaagattggggagatccccggcgtgatgacccatcggattgttgaagccgtgttctttgttcaaagggttgaacggaccgccggctgattcgaaatcaggtgcctgacatgtccctttttcataaatatgaaacccgagagaagtgccgggcggcagatgccccgctgatatatgaatgtctgacccttcatcatcagattccctcacttcgatatatccgatcgtttttccgttttgattgatgagtccggcatgctcacggtatgcagatgcttccaatgcgcggctttccccatgttttttgggcggaacaggagcgggtctccccccgcagccgcaaagcgtaattgatgcgagcatgagaaaaagcaagagacgattcatgcttcctcccccttatttttttacccatcagtcttgtcaaaacgtgaaaatggtaaacaaaaaaagccccgaaaggctttttttaaaaataactgcgcgctcctaaataagcttttttccaatacggattgcttaagtttgaaacttcaaccccggaggagcttgcgtgaataaaatctcctccgcctaaatacatccccatatgagaagggcccgctttatatgtcgtaaaaaagacaaagtcgcctgctgacggctggctgatatgtttcatcgtattccaatatccggctgtgctcagacgggaaacagagcttaccttatttaaaaggtaatagatgtaaccgctgcaatcgaagcccgcaggcgtattgcctccccagcggtaaggcacgccgacatgttttttcgcctcgcctatcattctgtcaatctttgaccctgtcaccggaggttcgggagtattcggcttgtttggttttgccggtttgttatccggctgccgcacaggatcttctgtttttcccgttccgttaatcaccagaacttgtccgatttgaagcacatcagttgtcaatttatttttttctctgatgaactgagcggtgatgccgaaccgattagcaattttccagagggaatcgcctgcttttactttgtaagtggatggcttctcagaagggtttgaatgagatggcggtgttgtgccgctgtttccgttatgtgaagaacctttgatctttaacacttgattcggatacagcatgtctgatgttaattgattcagctttttcagttcggcgatggtgatcccggtttgattggcgattttccacagcgagtcacccggcttcacagtgtaagtccctgatgcgcctttatcaggctttgtctgtctgccgcctccgtccgtgccgccggcagaccctttaattttcagtttctggccaggatagatgacatctgaactcaaacggttcaggcttctcagctcagaaacgctcattttgtatttttttgcgatcacccataacgagtctccgtatgtaactgtgtaggcacccgtgcttcgttttcccttttgccccgttttatgtgtgccgctgccgtcgggaatgtgcagccgctgtcctgggtggagtatcgttgatttcagtttattttccgcctgcagggctgaaatacttgtatgatattgccgggaaagcttccaaagagagtcgccgctttttacttgaatggtttttgcttcagcgggatgcacggcgaaggttgaagtcattactgcagatacagccagtccggctgcgatttttttcttcatataacgaaaaacctcctatttatcattgctgaaagggacgttccttttctttggacgccgcctgttatgcaggattcattcagaagtcgacattaattccgattcatttggccttagatcatcaccaatgccacacattttacataaattgagaacatttcacaaaagactttggaatcattttcataacatggcttttttccgcgacattccacctttcttgtctgtttttcatacaattctctttacggcgtgaaaaatcctcccgaaaaacaatcaaaaaaagcccgcttcctttaaaggaagcgggtgagggctgattacagaacccgggtctcggcagttttcacgtcttctgctatcaattccgctgcacgctgtgctccgccggccgctttcagggattctccgatttcagaagcttttgtctgatattcaggattttcgctcaattcttttattgcttcagtaagcagttccgctgttacatcttcttttttaaacattttgcccgcgcccgtcttttccacttggcttccgacggcgaactgatctgcgcccatcggaatgacgatcatcggggttttgtagtaaagcccttcgctcgtactgttcattccgccgtgagtgataaataagtccgctctcttcaggatctcaagctgcggaacataaggcttgacaatgacattctcaggaatttcatcaagctccgccggatcaagatgtttgccgattgacatgacggcttttccgttaaagtttctgaccgcttttaagcatttattaaacaattccttctgattgttaaaaatcgtacccatggaaataaacaggactttttctccttcaagctgttcaaacgggaaatcttgagccgccgccctttcggttatggacggaccgacaaagagataagaatcgccaaactcttcttctttcggctgaaacgctcttgaagtaaatacgatggtttttctgccgtcatttgagaaaatatcatacggcgttttaatgtctgcgctgaattcttcattgagccggctgaccgcttcggtataagccggataatgagatgattcctctgatacaaggtttgtatttgaaaacacttctttaataaatgcctcattcattgcaaatgtcgtacaaagtgaatatgccggcagtttcagctggtttctcacgagccttcctgccagaaaatgatgatcatacaggatgtagtcgtaggattcatcttttacttcctcaagaatacggagtgcggcttttttggaagtctcaatcattaatagcaaaaactcggtagcgtcccgctgttcatcacccgttgcgttttttccgaattcatctttacggaaatcttcatattcacggaattccgctccgcttgacgcgattttgttctcatattccttcacgccgtaatatacgacatgttccccttttgccttcagttcttttacgacgcctaaagacggattgatatgcccttctcccggaaagccgatcatcaatacatttgccatctttccactccctattcttttaaattttatgtatatttaaacgataacatcaatacagaaaaaggtaaagatgttcaccttattaatattaaatgggtacaatattcccattttcttattatttcgtatgaggcgcccgcggcgaaacaagcggatacagtccgccgtctttagcaaaggacatttttcccgtttcttctgaaacaacgagcacgagtgcatcagtcacggccgaaagtcccatcgcggccctgtggcgcgtcccgtatttgagatcgacatgttttgttgtgagcggaagcacattggctgctgatacaacccggttttctctgaccaatacggctccgtcgtgaagcggattgccgggataaaaaatactctcaattaaagctgcactgatctcggcatgcaggctggtccctttttgtatcattccgtccagcggatctgcacgttcaatcacaatcagcgctccgtgtttttcttccgccagatgctgcacggccctcgccagctctgtataggaaggcgtaaaatgttcgatatatgactgcaggtaaaacgacgaagcgacagcctgcatttcctgaaacgtatgtcccagttcatctaattcgcaaagaaggcattggtctttttcattcaatgtccgcagtatcattccggcatcctctgtaatttgtttcaaatacgtttgaacggcagcggtaaacgcgctttccgtcatttgagtgtggcgcatgtcacatcagctcctttcccttattttctgcatcgcgcgcatggatatgcgccgctgtgtgcaccataatcatgaaaggaggcgcacatcatatggaattcgcacggctgatgcaatatatctgcacctttttaggggtcatttcactttcattcatttatgccaagatgtttaaaaagccgaaaccggacaaaaaagagtaggccggctttcattgctttttatacataaaatgttataatttctctcgttaaaataaagaaacggggaacctaacttgagagaaacgaacacgatcggccaaaaggtcagacagctgttacatatcttcattccgattttaatcacacaggcgggcctttccctgatcacctttttggatacggtgatgtcagggaaagtgagcgctgccgatttagccggggttgcaattggttcaagcctgtggacgccggtttatacgggcctggcaggaatattaatggccgttacgcccgttgtttcacagctgtttggagccggcagacaaaaggaagtgccgttttccgtcatccaggccgtttatgtagcggccgttctcagtgcggcggttatcctgatcggctttttcaccgttgatatgatcttgggacatttgggcctggaacctcgtgtccggacgatcgccaaacactttttaggatttttatccctcggtatttttcctttgtttgtgtacaccgttttgcgctcgtttattgatgcactcggcaaaacgcgagtcactatgcttattacgctttgctcattgcctattaattttgttttaaattatgtatttattttcgggaaattcaacatgccggcattgggaggagtcggggcggggctcgcttccgccctgacttactggtgtatttgcgccatcagcttttttatcgtctgcagatttgagccgtttgccgggtactctgtatttcggaaactgtaccgtttttctccgtctgaatgcagaaagcttttgaaaatcggattgcctatcggttttgcggtattttttgaaacgagcatttttgcggctgtcacactgcttatgagccattttcagacggtgacgattgcagcccaccaagcggcaatgaattttgcttccctcttgtatatgctgccgctcagcgtatccatggccatgaccattttggtcggctttgaagcaggcgcaaatcgctatagagatgcccgctcatacagctatatcgggatcgtgatggcgcttagtttttctttatgcacggcggctttcattttgctgttcagaccgcaaatcgccggaatgtatacatccgatccggctgtgctcatgttgacacagcactttttaatctatgcgctgtttttccagctttctgatgccgtagcagctccgatacaaggcgctctgagaggatataaggatgtcaactatacactcggcgcggcttttgtgtcgtattggattatcgggcttccggtcggttacgcagtcggcacttatacgggcctcggggcatacggctactggatcgggttaattgcaggacttgccgcaggagctgccggtttattcttcagactgatgaaactgcaaaaacattatgtaaaaaaaatgatttcataaaggaggagcagcaatgccaaaacataaactgctgtacgattatttaactgaacgggcggaggacatcagtcagacatggtttgatacccttcatgatacggatcctgattctgtttatgcttctactgacccggctgtactcacgaatctgaaaaaacaaaatctggcgtttaattatcagctcaatcggattttttctgaagagaaggaagtatatacagcggcattggaaaagtgggcgttcgaagccgcacgggatgaagaacatttaaaaactcccatccattatattattcgcgagtttatcagagttcgtgatttgtatgtcggccatgtcaagcagtttaccagacttcattcagacaccgtgacagaagaagatgccgaagatatattccatacgctgattaaatcgtttgatgtggtgattcatattttcatagaagaaatgtataaaaacacaaacattcagcttgaagcgcaaaaagaattgattaccgagctgagctcgccggtaattgtgctttttgacaatgtcggactgctgccgctgatcggggatattgacacggcaagagcaaaaatgatcttggagaatacgctgcaccagtgttcagagaagcgcatcacgcagctgtacattgatttatcaggtgtagccatgattgatacgatggttgcccaacagcttttcaccttaattgaatcactcggaatgctcggcgtgaaagcgacattatccggaatccgtcctgaaatcgcccaaaccgcagtgcagctgggactgagtttttcaaatttatcaataaggtcttcgcttgcagaagcgatcgcttccgatctgacacaaaaaaagggataaggcatttcagccttatccctttttttatcagtctttccacggatatgtccaatacacttcttcttcaaaccatgtctgaagaaccggctcgttattttttattttttcttccagctctctcagcatgccttccgtttgggtgcggtgcgcttttaaggcattcattttaatatcggcaacctctttaatatcaagaatgacatcaggcttgccgacggcttcctccctgttgcgggtgattgccatgcaaagcgtgcgcgggcggtcctcttttttctttctgtaaagcgctctgataaccgcttcgccgcatgcatcatgatccggatggacgccgtgctccgggtagaatgtgacaatcagactcggttttacatcgtcgataatctcttccatcatatccgcgagccactcgtcatcttcaaattcaagtgttttatcacgaagcccgagcattctcaggtcagtaacgtccattgctttgcatgcgtcgatcagctcttgttttcttaacagcggcagtgtttcacggttcgcgaaaaaaggatctcccatgttccggcccatttcgccaagcgttgcgcatgcatacgtaacgggaatatctttttgtctgtgtaaagcaatcagccctgccactccgtatgattcatcatcagggtgaggcaggatgacgagtacatgttctttcatgattttcacccttttctttaaactgtaaacggcttttcgctgatttgaagcgaaatcgccaattttccgcccggcagatgccctgccattaacaagcggtcttcgtcatctactgtatattcagtcagaccttctgcgtaaatccagccttcttccgttttcaaaccgacgcggtacgggccgtttcctttgattttcgcctgatggtacgtcacttttgcattgcgtatataggctacaaccgtcatgtttttctcattcagatgcgctgaataagaaccggtcgttgtttccaaatggatatatacaggacgatcggcatatcgctctaaagaagtttgcacatcttcttttatgatcgctttcatagctgctcccctctttcttcttttaaaaattgcaaacgcttcgtatgtagttcaaccaattcatatttctcaatcggccgcagccgggaatctacaattcgctgcaccgccagagcaaacttttcctcgggtgacttccggagcctcggatgtgttctttgatcaagcagttcaagatcaattgccttctccgcttcttcaagagttgaagccgggagagtgcggttattccacagtgcctgataggcttttgctatgtctttatcagtgcccattgtacagctcctttacatactcgtaatgattatacataatttaagctatcgctggaaagcgaaaggcttagcggctttttatcggccgcttccattttatctgtgaaaaggtaaacaaaagcaatgctgcccatatacaaatgaaggtaaacgctttttgcccggaaaacggttcatgatacacaaatacgccgagcataagggtaatggtcggcgctatatattgcaaaatgccgacttgatacagcggcagacgctttgccccctctgcaaacagcaacagcggcagggccgtaaatacgcctgcgaaaaataggagcgcccatgttcctgcccccaaggacccggaagtgctcccgtcagctgtatatcctaaataaataagtgcagccggggtaatcaaaagcgtctccagcgtcagtccgatcgtgctggacatgcgggttctttttttacataagccgtacagaccaaagctgaatgcaagcagcaatgcgatataaggaaccgcgccatattgaaacgcagatatgatcacggccgccccggcaatagaaacggctgctgtttgcatcttgttaagcttttcttttaagaataggatgcccaaaagaacggaaacgagcggattaatgtagtacccgagacttgcttcaagcaaaaagccgtgattgacggcccatatgtacacaaaccaattaacggaaattaaaacggaagcgaaaaaaagcgccagcaggcccccttccgatttcaaaagacgcagttcacgccatccggttttccacttcttaagcacagttaaaagcacacacatgaaaacaaatgaccataaaatccggtgagctaaaatgtccaatgcgggtatttgttcaagaagtttccagtagaccggaaacagcccccacatggcgaaagaacaagcggtataaatgattccttttcttgcgttattcccttgcacggccttccccttcctttctgtaaacagattatattatatcacgggaagcttccggcgggcatatactatgttgtccgttaagaaagggtgagatgccgtgtttgattggaacaaatattttcccttccaaaatcagttctctaaagaaacgtttaaaaatgctgatccgaaagatgtcgagacatatgtcaaccgagtgatggaaagcgtattcggcgccggttatgccggacagttcccttttcgcgatcccatgtccaaaaatgccgagtcggtcgaagcggaaccgcccaagccggaaattgacctgtttgaaacatccgatcatgtttttgcgaaaattcccgccgaacaagaggaactcgaccgtatcaggattaagcatacgtcacacagcctcgttgtagagaacagcagtctgggagaaggaaaaaaagaaatcgtccttccgagcctcgtcaaacggaaaggaacaaaagcagtctataaagacgggatgattgaagttatgttttcaaaacaggaagactacaatctatcggaagtggagattttaagataaaaaaacggcccgcgcgatgcaggccgttttttctttaataaaatggcggataaccgccggctcccggcccaaaaccgccgtatgggacgcctccgtatccgtaaccggcgaacccgtacggatagcggggtcttgtgaaacctgtggcaatcacgcctccgagaagaccgcctaaaaatccgccgaataaaggagcgccgaacaaaaaaggacttctcgccggaaatccggcaggaccgaaattcccgcgatacaatgcatgacgagggtacatgtttttcctcctttatgtctgcctattcttaagcgtattcataaaatgaggaaattgattgggcgattgtaacaacatgtgcctttctgtgatattgcattaatgtataaatattttggttataatttgattacattttgattaactgttatacttttttacaagttgcgacatgataaaaaaccatcagggggaataaaatatgccattacttcgttttgacgttattgaaggccgggatgacgcagcattaaaaaaattactggataccgcccattacgccatggttaaagcttttgacgtccctgtaacggaccgttatcagatcgttcaccagcatcggcctcatgagcttatcattgaagataccgggctcggtttcaaaagaagcaaagatcttgtcatcatcagcattgtcagcaaagcgcgcaccgaacatcaaaaagaaacgttatatcaactgatggctgatcagcttaaaacagaatgcggcatatcacccgaggacatcatgatttccattacagaaaacgggaacgccgattggagcttcgggcttggtgaggctcagtttttaaccgggaaactgtaaaaggcctccccgcttgttctgaatgattgcaaactgaataaaagagggatgtatgttggttagtgagttatatccttttttgcggatttaaaggattagagacaaatcccgtttataacggcgaatatcaaaaaacattgatatttgcccctgctgcgggtttgaattcggctacagagaggaccatgacgtaagcttagggtttattgtaacgcctgatcatttaattgaagcggcatttcagttataccggaaacagtggattgagggaggaatgaaactattttctccaaatgatgtcccggcggaatgtaaaaatgatcatttccttacattcgatgctttattaaagcaattaaaaggcttgaacctcaatctgaacaattttgatattaatggtttttatgacgggtaaacatgatcattaagaaaaggctgccttgggcagcctttgttattcatcacatgtgtcgttggcagatcccccgggctcgcaaaaactgtctgcccatttttgcatttcctgaaaaacggcttgcagggccatgcctttatcagtcagtttataaatgactttgacaggtgtttcaggcagcacctgacgctcgacaatttcattttgttccagctctttgagccgctccgcgagcattttttggctgattgtcggtatcgtttcggtcatatctttaaatcgtttcggcccgtccatcagtacatggataatgaggccgttccagcgctttcccaaaagagaaaaagcggattccattttaggacacattgtatatcccacgtgagttcatcccttcatctgaattgacaagttttttgtgatccattaaaattagttttcgagttacatttagtaagcttctaacttttctattatgataacacgtttatccgaaggaggaaacatgatgacatccgtattagacgttttaaaagaacgcgcatctgttaaagaatacgataaagacgcggtcattacaaaagaggaattaacagaactccttgaaatcacaacgcaagcgccttccgcctggaaccttcagcattggcattttcaagtctttcacagtgatgaagcaaaagctgccctgcttccggttgcttttaatcaaaaacagattattgattcatcagcagttattgccgtattaggcgacttaaaagcaaatgaaaatggtgaagacgtttatgctgaactggctgagcaaggcaatatcacagaagagattaaacaaacgcttttaggccagattaacggtgcataccaaaatgatcagtttgcccgtgattcagcatttttaaacgcttctttagcagcgatgcagctgatgcttgccgctaaagcaaaaggctacgacacttgcgcgatcggcggattcaataaagagcaattcgttaaggaattcgacgtgagcgagcgtttcgtgcccgtcatgctgatttcaatcggtaaagccgttaaaccggcgcataaaagcaaccggctgcctgtatctaaagtgtcaacttggctgtaagatgaaagaaacccttagtccgcttaagcagactaagggttttttataggaatcgctcactgtaccaggttcgtgcctgctctgcttcctgctgtgtgagctgatgaccgccctcctgccaaacaagagaaacggatgcatgggcatctatcagatactgataaagctcctccgattcttcttttgtacatagaggatcgcgttttcccgcaccgataaacacaggcagcccttccatatcaggcagcttcactccgcgtatcggcaccatcggatgatgcagaaccgctcctttcagtacatctttataatgtaacaaaagacttgctgcaatattggcgccgtttgaatagccggcagcaatcacgttttctctgctgaatccgtacatttgcgccgcttcatcaataaaattctttaattcttccgtccgttcaattaaatctttctcgtcaaatacgccttctttcagccgcttaaaaaaacggggcatgccgttttccgacactgatcctctgacaccgagcagacttgcgttcggatcgataaaacgtccgagcgacagaagatcatgttcatttcctcctgttccgtgcaaaagcagcagaacattttctgacgttccctgttcaaacacatgtttcatcatcattctcctttctccattttgggcagaacagctgtaatctggctgcgatgctcttccagccattccggaagcttcagctctgttccgagattttcaaaggattcatccgtcataaaccccggttcatcggttgccatttcaaataaaatgccgccgctttctctgaaatagattgaagtaaagtaagacctgtcaagaatgtcagatgaagcaagatgagaatcagcaagaatatccttccattccgcctgctctttttcgctagtgcggaaagcgacatgatgaaccgtcccgtaaccgccgatacctgcttctttcggcgcgagatcaacatctataatatgtccgatccgcgcctccgattgcagcctgacaatctgatgttcttctcctgtctttgaataaccgaagcgttctatgagaaatttaatggttgcttcaggacggtacgagtacagaagaacacctctcatgcctgtgatcgcttctttttcagtaatgcccgcaggagtccattcactctgtccgcttctttcatcttccattatggcaagcggcaggtcttctgtatcattaaagagaaggacttgttcagacagcatgatctgttcttttacagacaagccattttcttcaagccggcgcttccaaaacgcgagtgctcctctcggcacggagaaataaattcttccggcctgcccttttcccacggttcccgggcggcttccctgaaaaggaaaaaatgtaatgatcgtgcccggctctccgttttggttgccgaaataaaagtgataagtggccgggtcgtcaaaattaacggtttttttaacgagccgcaaacccagcacttcagtataaaaccgaagattttcagcaggatcttttgcaaatgcggtaacatggtgcaatccttgcgtattcaatgtattcactcctaaatatcttgatttcgagatattaactattttaatttaatatgaatgaagatgcaactaaagtgtttcagttaaaaaagtaatagaattcttttttttctgaaaaatatcttgtgatcttatctgacacctgctatgataaggagcattatcaagtttcaggaggaaagtaaatggtcagaaaagcactaattttcgttctcatcttaatccctttcagccagctggccctgctgtcagtcgctaatcgggttcatccgatcattatcgggctgcctttttttcatttctggctgcttttatggatcgcagtcactccattatgttcgtttcttatttataggctgcagaagaaacaaggaggactggactgatgcccgcaaatataacagcattgatcattacagccgtcatcgttttaaccgttgtctgtatcggctttatagccgggagagacaaatcatcacgcacttctgttgaggaatggtctgtcggcggcagacggttcggggggctcctcgtctggtttttagtcggcgcggatctctatacggcttatacgtttttaggcttaacaagcacagcctacacagggggaagcgttgctttttttgcaatcccgtattctgttttggcgtattttatcgcttatttcttcttgccgaagctgtggaaggtggcaaaaatacacaaattaacgacgcttgccgattatgcccgtgagcgttttgacagtaaacttttggccagtcttgtcgccattgtcggcgttcttatgctcattccttatatttgtctccagctgagcggaattcaagatacgcttcaggtggccggaacgggtgtcattaatgtcaatatggtcgtcatcatctcttttattcttgtagcgctgtatacttttttcagcggaattaaagggccgacgtttacggcgattattaaagacattctcgtgtgggtgattatgctgtttatggtcgtgtcactcccgctgatccattttcacggctggacgccgatgattcacactttggctgaaaaagcgccgcaaatgctgacgatcccggactcggggccgaaaggaattccttggtttatcacagcttccatcgtatctgcgctggcgctctttatgtgggcgcatgcggcaaccggcgtatttacggcaaaaagcgcagatgccgtccgcaaaaacagcatgtttctgccgctttataatattgttttgattcttgttatttttctcggctttatcgcgtttcttgtcctgccggaagataccaatccgcggcttgctttattgaagctgattcaaacgtcttacggcggagtcgcgcagggctttgcttactccacgattgcccttgcgtcattgattccctgctctatcatggccatcggagcatcaaacttatttgcgaataacttatatcgggatttgattcacccgaatgtgtcaccaagcaagctgacgatgatcacccgttcaatggtatttgtcgtcatcggactcgcgcttttattcggcatgctgttcccgactgcgctcgttacccttcagcttctcggtgtttccggcatggttcagatctttccggctatcgccgtcagtctgttttggaagaatcaaacgaaagaagcgacaattatcggtcttctcgtcggtcttatcgtgacattcacggtaaatatcacccaatccgcccacggtatatatgaaggcttttggggtttgaccgctaacatggcagccgttattatccttaacccgttttttgtaaaaaaagcggcttcaaacgccgtcaaagacggtttattcaataaagcgccttctgatcaactgaaccaaaaaggcgcttaacagaaagaagccggcacgtaaatgtgccggttttttacttttttcacttccatttgtaggtagccacagttttagccgggatgacagcttcaaactgccgattttctgaaacgacatggaatttttgatcggcggatgtctggttgattatgactgtcacaatggattgatcaggattaaggaacgatacattcgagactgtgtttttggagccgtaattactttctatccgctttgctccccggtcgataaattttgaaaagttgcctgtcatatgaaagatcgggatattccaatagcggtcagggtttttagcatcctgaataaacagcgtcgggtctggggtgcctatccaatgatgcgtcttgatttgactgtcgagcatcgtcacccacgcattgtagctcgacgcgccgttgcggaaatactgcgcgatccggtccgcccctgccgtcccccagacagaccgctccgttaagtgaatagatttatcaggatatctctttccgatttccgacatgacggaaaggtcaccgtcataatcgtgaaaagcgataccgtctgcggcacggtttccttttttatcatctaaaatcggcggaatatagttccacgccccgctcgcattgtgatcataaatccaaattttcgtgtcaattacatgttgtttcatttctttttttaaggccagtgccagtttgcgctgctgagacggcggcatatacatgctcggatagtcgatttccagcaaaggttcattttgaagggtcatggcataaatcggaattccttgcttttcgtacgcctcaataaatttgcggaagtaaacggccagtgcgccgatatatttatctttcagctttccccgcttgaggttttcattcgttttcatccaagccggcggactccacggtgaggcaatgattttcagttccggatttatcgccagcgcttccttgatggttgctgtaatgtgtaaatcaatatccttttggatcgagaaatgacggagcttaggatctgtttggccttcaggcatatcgtcatacgtataaaattcctgtgccgtaaaatcagatgtcccgatcgttatgcgcataacgtccattccgataccatctttgggatcaacgagttttttcagcacttcctttctttttgcgggtgtcatttttgataaattatggattgtggattcttccagggacgatcctacgcctaacacattttgatagcggcgcgacggatcaatatacacagcggcggagtcagaagccttcttttttgtcaatgtaagcggtgtttgttcgtctaaggcgtatttcacttccagcggcccgtcataccacgtacgggaagccggatctttttcagaactgaaccacacccttactttgtttttgtctgaagccttccgatcagccgcatacacttcggtttccatgctgcttgatatgaaaaagaaaaacataagaaaaaccagcgtcatgtgcagaccttttttaaaaaacatgaaccaccatccctttccttatttttataagcgatctgtaaatgaaaagccggacactcacctccttcccactcgaatgaatacgctttcgaaattactgataaaaagccggcttcacacaacggtgaagccttccctttttacacctttaagatacatatgagccgtttgtttcaatcacttttttataccattcaaatgagtctttcttaagccgcctcattgaaccgttgccttcattatcccgatcaacataaatcatgccgtagcgttttttcatttctccggttgtaaatgacacgatatcaataattccccatggtgtatagcccattacatccacaccatcatatgtgattgcttttttcaaagcatttatatgtgacgataaatattcaattcttgaagtgtcatgaattgaaccgtcctcttctaatgtgtcgatggcgccgaatccgttttccacgataaataatggaatctggtagcggtcgtataagcggtttaatgtgtaccgtaaaccggtcgggtcaatcgcccagccccaatcactcgctgtaatataaggattttccacgccgtttggcaatcctccgtttacgacatctccggtattatcgtttgatacatcactttttacggttgtagacatgtaatagctgaatccgaggtagtccactcggccgtttttcaaaatctcttcatcaccgtcttcaaagtgtatctgatagccttctctttcaaactcttttaacgcatagcttggataatatccgcgaacctgcacgtccgggaagaaaaaacgctgtctcatcgtttcttcagccagcatcacatcgtcggggtgagatgagtacgggtaaatcggaacatgtgataccatcgcgccgatcctgaactcaggattgatgtctcttcccttcgaaacagccaatgcgcttgccagcagttcgtgatggccggcctgatacatgacttcttttgcgttttcgttttctttgacggcgacgcccgagttcgtccataaaaagatcggattattcacatccatcttattattgatttcgttaaacgtcatccaatacttcaccttatgtttatagcgttcaaaacacacttcagcgaattttacaaaaagtccgactgtttttctgtttctgaaaccgccgtattctctcgccaaatgcagcggcatctcaaaatgtgacaacgtgattaccggttcaatcccatgtttcagcaattcatcaaacacccggtcgtaaaaagccaatccttcctcattgggctcggcttcatcacctttaggaaaaattctgctccagccgatggacgttcttaaacatttcaggcccagctcgctgaataatgcgatgtcctctttataacgatgataaaaatcgatcgcttcatgattcggataaaattcccgctcttcaattgtatctgttattttccggggcacaccatgcgcgcctgccgtcatgacgtctactacactcggccccttgccgcctttattccatcccccttcaaattggtgggcggccagagcgcctccccataaaaaatcttttggcaatgtccccatcgtttatatcctcctttatttgactgccgcttgcatgccgaataaatgcactgcagccgcttcaagcatccgcttcgcaagtgcagaagaatgcctgcctttattttcatattatacgtttacattataattgtaccggtataatttatcaatacataaacaattatagttaatttacgaaatggcttttaaaaacgattatgctataattctggaagaagcgggacaataaatgaatgaggaatgtatatgttaaaataccagcaaatcgcgatagatattgaaaaatacatagaagaacatcagctgcagcaaggggataaactgcctgtgctgcaaaccttaatgagccggtttaacgtgagcaaaagcacgatcaccaagtccttagatttattagaaaaaaaggggattgtgtttcaagtgaggggaagcggcatttttgtcagacggaataaaagaaaagggtatatcagtctgctttctaatcagggatttaaagaatcacttgaagattttaatgtcacttccaaattattagcgctggaagtgagaaaacccacgcctgaggctgcccaaaatctgaatatgccgcctgacggcgacgtgtattatgtcaagcgaatccgatatattgatgggctgacattgtgtatcgaagagtcattttacaacaaatcgattattacgtatttgaataaagagatcgtggcagaatcaatatttgattatattagagaaggtctcgggttaaagcgcggtttttcagatttatatctgtacgcggggatgttaaatgaggaagaagcggagtacttaggtctgtttacaggagcgcctaagctttgtgttgaaacgatttttcatttaaccaacggccagccgtttgacttctcaaaagtcacctatcactatgagcaatcacagtttttcattcaggcgaacagccacctttttgaacaggaaacgacataagacgggcttttcgcaaacagaaaacacccaatgcgcgagcggcgcatcgggtgttttttactatttcatattcttatttaatgtttcaacggcttttttcatttgtgtatcgttgtccgcaagctgtttttgcagatccgtcatcaattttgccgttgtgtctccctttataatgcctgtttgtttcagtttctcttttgcttggaattgtttaacggcttgttcaaatgctttatcatacgtgccgtttactttcacgctgtaccccagcgctttcagcattttttgcgcattggtgacggtggttccggaatccccgtatttgtatgtttttttcgcatctaaatacggcaggttcgcatattcaggaagcttaacctgatattgcggtttgatgccttttttatgaatccactctccgtccgctgtcagccatttagcgattgtcagtttaacggtagaaccgtcgctgtaatcttttgccgtctgcacggttccttttccgaacgttttctcgccgatcagcggaatgcccgatgattcatgcagcgcagccgacatgatttccgcggcgctcgcggtgccgtcattgacgaggacgactgtcggttttgtcacttttcgctctttcgtcgctttcatgacttctttcgtgccgtctttgtattcgacctgcatgatatttttccctttatcgataaacatgttgctcattttgatggcttcatccatcagtccgcccgggttgccccttaaatcgagaatgtatcctttcgctccttgtttttcgaggctgtcaatggctgaattcagctcttttgccgtcgattcggagaaggatgtgatttggatttcgccgatgtctccttttttcatttcagagtacaccgtttcaaccggaatggtgtcacgtttgatcgacaggttcagatcgccgacacccgctctgtgcagcacaagcttgacgtttgttccctttttgccgcggattaatgcgacggcttcgtttacattaaggcctttaacgcttttgccgttgaccttcaagatctggtcattcggtttaacccccgctttttccgcgggtgaccctttaatcggcgatacgatcaggatgctgccgtccttttcttccacttgtgcgccgatgccttcaaacgaagcggaaatggtttcttcaaaagactttccttcctgcgggtccatataagaagaatatggatcatccagggaactgatcatgccttttatcgctccgtctactaatttgctgtcatctgttttttgatagtaatcacttttaatctgctcgtaggctttattgaatttctcaaatttgctgttcgtcaaagcagccgagccttgtccgaaaatggtcgtattgcccgtgataaacagcgtaagcgccgaggctgcgaccgcggtgatcaatataataaaaaacagtttaaattgccgcttcaagaaaacaccacctttttattcttacattattatcatagacgaacgctcattcgtcaacttcaaacgtgaggcgcccttctttcccgtttacccaaacctatgcttttctctcaacatatgctgaggaaaaaaggaggattcggcctttgagcaaatatttagaaatgctgtccttattcggagtcggaggggctcaccccggcgggctcgctttttccaaagccgttctcacaaaagcggctcctcctcctggcgaaccgattcttgacgccggctgcggaacgggacagacggccgcttatctcggccacctgctgtaccccgtcacctgtgttgataaggatccccttatgcttgaaaaagcagcaaaacgatttgccgctgaaggcttaaccattccgggctatttggcggagcttgagcggcttccgtttgctgaaaatcaattttccgccgttctttccgaatcagttctcaccttttcaaatcttgattcatcgctgtctgaaatcctgcgggtccttaaacccgggggtatgctgatcggcattgaagctgctttacaaaagcccatgccggaaaacgccatcacgcagataaaagacttctacggttttaccgtattgcaggatgaaacggcatggaaacagagattgcttaagcaaggctttcagaaagcggatttcattcccgctgtctttgaaaacaatgcgcaggagccgactacagaaatggatttatcgcccgttattcagccggttcactacgatacgctgacggctcattacgagcttatgcagacgtaccgtgaatatatgggacactgcgcttttgtcgcttacaagtaaaacggcgattgtcctcctgttttcgtccaacctttttaccgcactctatcataagctgacatagaaagataggttggataggaggagaaaagatgcaaaactattatcatctttgccggcagcaccaaggaaaagtagcaagaattacagaacgaaacggcagagtccacgtcggaagaatcgtacgggtgactaacagcaaagtgtatatcgcccctgtcggcggccgtcacagaggatacgggttcggctattggggaggctggggaggctggggagcagcctacggtatcggccttggtttaattaccggatttgcgcttggaggtttactcttctggtaataaagaaagcccgctttctatttttcaagcgggcttcttcttattacactttctttacttcattaaaatattcttcaagcgttaattgatggtcatggatggcttttgccgcttttttgcctacatagcgtaaatgccatggttcatactcatactttgtgacattttctttgcctttaggatagcggatgataaagccgtattcatacgcatggtctttcacccatttgccgtccgccgtgtttccgaacgcttcattcagctcatatccgttgcttttgctggaaatgtccatggcaagccccgtctggtgttcgctttgccctggatatgcgacggcttctttcgcctttttttcacctttcagactgacttcattatcgaaaataactttctgtctgtcataagagcggtatcctgaaacggcaaccaggtcataaccttcttttttcccggcgctgaatagttccgccaaagcatcggcggcaggtttgcggatatatcgtttctcgattttctcagtaaaagaaaattcgactttcgggatcacgagatcattcggtttataatctcccggcagcgtgtatgtcttattcacgagcgcaagtgtatttgtcgggttttgaatggtctcaagcccgttcacttctttaatatcattaaaatatttgctctccaatacaaaatcgctgttttctgccttcgttgtttttttgcttgatgtgtcatctgattgttttgtttcagctgctgtttttgtgtccttgtggctgtcgccgcctgaaatgctgcagccggttcccacgattgcggttacgctgagagcggcagcgagcgagaaccatttagtggatttcttcattttacacttacctttctttttttgaatcagggcgatgcataaagaagagggctgctttaatcagcataaccctcatctcaagtttacgatacagtatgcagcgccagtttaatcatatcatgaaaagtcgtttgacgctcttctgccgttgtttcttctcccgttaatacgtgatcgcttacagtcaggatagacagcgcttttttgccgtatttagcggcaagcgtatataaagcagtcgtttccatctctacgccgagaacgccgtatctggcaagcttttcgatttgggagtcttcattgtaaaactgatcggcggtgaatacgcttccgaccgctacgggaagattgtttttttgcgcttcctggtacgctttatgaagcagttcgaagtctgcgcaaggagcataatctacactgccgaaggcgacacggttcatctgtgaatcagttgaagacgtcatagccaaaatcacgtcacgcaccttcacgtcattacggatggctccgcatgagccgactctgattaagttttgaacatcatagctttgaatcagttcattcacataaatagagatagacggaacacccatgccggtgccttggactgatacttttttgccgttatatgtacccgtaaatccgtacattcctctgacttcattatagcattccacattttcaagataagtttccgcaataaatttcgctcggagcggatctcccggcaaaagcactgtatccgcaatttggcctttttctgcgtttatatgtacactcatttccttttcctcctgcctattcaaactcccacccattgtacactgaataacggtaagagacaatcatcagcatgatcagggcgatcttgggcagaatatgcgggatgacaagcctaaagaaaaaggagtgaacataatgggcaaaaaacagcgcaaccgggtgaccggccagaaaaagaacaatcacgtgcccgtttcagacgtcattgcagctgatgaagcgcatggaaaagagcattccgccgctaaacggaagccttaacactgtctttcccagacaatacggaagccggctgaagattcagccggccccgtcttacctcggctggacgagcagccggttaattttgctccatcccgcagggttaagcctgtaataggtctttccttttcttccttcgtctatgagtatgacatctccggtcgctatgaatctggcttgatagtcgtttgggaccgtatcaggcacattaaaaacagaaaatgccctttccagtgcgtcttgatgattgtcagcggccagctctgtccgatagacgaccctgtatccctttttctcgccgtagcggggtgtttgaaaaatcgtcacatcataggcgcaaatcttttttttaaacacgggcagcgataacagcatcaagatccctccctcttatttcttaatagtattagcgttttttctcatttctcctgtctctatttttgtcgaaacggatgatacttttcgtcaaagagcgcaaaaagcgaaacgaggcaaagtccgagactgaatccggcaagcacatccgtcggaaaatgcgcgcccaaataaattctgctgaatccgatcagaatgacgagaaccccggtaaaaacggtgacggcccgttttcttttcgtgaaaaacggaacatgcttgatcaaaaagtaagcgatgacgggatacatcactgccgaattcatggagtggccgctcggaaaactgtatgaggtttcatggacgagcggttcaaaagcgggtctggctctttcaatcaattcttttatttttatgtttacaatccgttcaatgagaaagagaagcggcaaaaaaacaacatccggcgtttttttgtacatatacagagccgcgcctgtcaaaagaagaagcggcaaaagcaccgcggtcgtgccgagctccgttatccataacatcaattcattcagccagggagccctgatcctgacagccgcttctatgagacgctcatcaaaaacctggacggcttctatccggatcgctgctgcgagcagaataaacaatgcgaaaagacttgctggcttgtacaacgttttccccccatgtttcattctcccgagctgattgaaaaaaccgaagctttttcacttcggttccgcagtttcagtcttcatcaagctcttcgtctatcatacatttttctaataaataatcaaaggtgatgtcggctatttcgaagatttcctcttcactcggtatgtacccgcgcatagcaagctgactgtaaaaataatcagctatttcttctgtgtcaatcacaagatctatttctttcatgcaaacaccgcctccttttttatgttttatgaaaaaaccgttcaaattatacccgaaagttctaaacgttttgtccgctcatatacttttaaaaaacaagccccggagggagaaaagatgatgacgaaaatgatggctttattggacggagatggatttgatatcgtattggaaaaagtgctgaaaggaatgtcgtttgtaatctttgccggctgtctgccctggtttttatatgtcaccgtccgtttttttgccggctagctgaaatgctcccgcaggctttccagcacaaaattcatcatatctttatattcttcgtcaccgaacaaatgataaagaatcttataatcgttataaatatcaagcagctcatctacaatcgataccgccagcacatgcagggcatcgggatcatcagcatcgccttcaaactgaagaagagcagacgcgacggtatcctcgccgatctcatgagatgcttccccaacatagtggacaaacagcagctgatgtacaaactgatccatttcatattttctcagaaccagcgtgagatcctcttcctccgtttcaagccactctccgtctttcagccgagtcagctcataaataatatcctcccagccatcctctaaatatctccatatttcagttctgtggccgatgacacggaataattcctttccgtagtcctttacatatactacgtcgccgatcagaaattcatattcaatatccaatttttccatatcgacgatcacgccctcataatctttataaagctggatggacgattcaaaataaagcacttcattatgattgacttcgtaaagataatgtttatcaatttgatgaaccttcgtaatggtgccgacggttccgtacatcacgacgaccacgatgtctcccacttgaaatttcggtttatctggcttcatgctgtctcccccttgccgcggactgtcatacgctatcgtatgccggccgccatcatttcgcatgggcatgaaaaccacaggaaatatctatttctgtacctgttcaaaatggcaaaaaccgcaacatgcttgtgcgttttttcacttaccgtaacagaagcgtccgatgacattccgctctcgatcgaatgagcagtaacaatgctgagacaaaaagcttctattttttatgagtctttgtttttttctctatgacgcaaaggtaaatacccggcccgaaggcatgttgacaatatcaccgccgtgatgttcaagatttgccgtgaaacaaatcatcgaaggtgtatggagattcaattcaggctgcatatttgcaacagaaaaaaaccgcacaatgtgcggtttttcgtcaggcgtgatgcacctcggtctcatatttttcccaagcttcatcaaatgtcgccatcgtttctaaatagtcggcgctcagttctaaataagaactgagctcgtgataatcgcttgacgttttcggaaagccgtgatcttcgtatgcctgattcgcaaactggctgattgcgtcctgcggcttgggatgcctgtatttcatcaaatagtgataaaaggatttcatgggtttcccctcctgatgactgtcttttgttgtactattatacaattcaagtgtgaaattacaacaaaagaagactaggagaagtcaaaataatttcgtttcaagatccgttctgtctccatcagctcttgatatgtgagtgtttccggtaatttttttgcttcgactaaaaaaagctgattttcgatttccgctatgaccgcttcctcctgataagtcatgccgcaggaggaacaggcgaatgcgggtgtttctgtaatttctatggccctcgtaccgtcaggaagctcccagtacacagccgcctgactagctgacgccttctgattgccgcaccactcgcatggcttcacggcgactcacctccgacttccgatcctgctttttgctctttcttttgctgtgcaataaatttcttttctttcaattcatctctcttttccctgcggtctttcagcgtttcatgatcagggtttgatgtaaacgttttcctcctgtcgatcctcgatacattttccggtgtgaacgaaacctctttgtccgcgaaaatggcgctcagtccgaccggctcgtgtttggccatcgttcccggaaaaacagattcaaaatagtcgtcggcttgattcgggatatagttttccggctcgggataagatgtaatcaccccttcgaagtttctgatcacaactttctccggactttgggagagcaagtagttcggctgcagggcgattttaccgcctccgcccggggcgtcgacgacaaaggtcggcacggcaaagcccgttgtgtggcccctcagtccttcaatgatttccagcccttttgacacaggcgctctgaaatggccgatcccctctgacaaatcacattgataaatataatacggacgcacgcggattttcactaaatcatgcatgagttttttcataatcggcaccgaatcgttaatacctgctaaaataacggcctggttaccgaccggaacacctgcgttaacgagcttttcacacgccgcaaccgattcttccgtcagttcgatgctcgtattaaaatgagtgttcagccagaccggatgatattttttcaaaatctgacaaaggttatctgttatccgctgcggaaatacgacgggcgctctcgttccgatccggataatttcaaggtggggaatgtcacgcaggttttttaaaatatattccagaatctgatcgttgattaaaagcccgtctccgccggaaatcaggcagtcacggatttccggcgtttcccggatgtaagcgattgccgcatcgagctgttttttcggcacccccattccgatctgtccggaaaaacgccttcttgtgcaatatcggcaatacatcgagcattgatttgtcaccagaaaaagaacgcggtcgggatagcggtgcgtaagcccgggaaccggtgaatcttcatcttcaaacagcggatcttcaaggtcatatttcgttttgtgcatttcttctgacagcggcacggactgcatgcggatcggacatctcgggttatcgggatccattaaagaagcataataaggcgtaatgttcaggggaatggtttttacagacatcctgacgccttcttcttcctcttcggtcaaatgaatgacttttttcaggtcatcgacggttcttacagtatgggtgagctgccacagccaatcattccacttgtcttccggcacatctttccacaattcaatctccttccaatgacgcttcggctgaaaccatttgtttgtcaaacgaattcctccttatgaatggccaaacgtaaagtcttgcaccatatattcatattttcgagcccttctgaaatgcggcagttgttcacaagcctgcctctgtagccgtatccggcatgatacaaaacggcattcatcccgtaagacgctgcacgggccaaggaaaaaagatggatgattccccggcccgcgagttcctgctccaacgctttaaacaagtgtgccgttacggagttccccctgtaatctgacagaaccgcgcaatcggtcatttcagcgtgccccaataccggattgatatctgcgcttgccgccccaataagacgatcctgatcgaatgcggcataatagatggtgttttctctcattgtttttttaatataaaggggattaaagacaggagtcggataggtaagaaaaacatgtttatataagtgcgttaaacggtctgcatcatcttcgtccgcttttctgaacatcagcgcgctttctgtctgagtcagtccccgccgcggtgtctcatataaacggtcaacagtcgaatcttctgatacatatgaatctgaccgtctccgttcctctgataaatagcgcaccatcacaacagcctcatgcccgttgtaatacccgtctatgacaccctcaacaataaaaagatgcttgacaaattccggctcatcgccgcgcttggcaaagaaaattaccttttgggctccttcttgctttgcttctgccaaaacggccggaataagcgccgtgatctgtccgtcataacgaatgactctgagccgctcattgaaacggtctgcatcaatctcggccgctcccttttcagccctcagttcctttatcagctccgtcacccccatctgccaccccgcaccattccatgataaaaagagaaatgattttgacggcatcgattaacgcccggatttcaatgtattcattcgcctgatgcgccgccttgacttctcccggcccgaagacgatgaccggcgtctgtcccgcgtgctgcaaaagccctccgtccgtaccccacggggacgcttcacgaaccggttttgcccctttcattttctcaaaagaagattccagagcggaaatcagcggatcctcatccgggagatcattcggaagccactgagccccaaaccattctatttccgccgggtggtgtttaaaccactcatcccggtactccaaatctttcagccagcttgcgagctcttcttttactgcttcgggcgtttcatccggcgctattccgcacctgccttctatcaccacacggtcagctaccgatgatggccacgttcccccttggacggtgccgatattaatgggaaccggaatcggaacgtcccgataaagcgggtctgtgatacgggcgttgcggacgtgttcaagctctttaagggctgtgatgacatgcaggcttttttcaatggcgctcaccccttcatagcgggtgccgccgtgtgcggacaatccccttaccgtaatgcggaaccacatagacccttgctgcttaacaaatagctttaaattagtcggttcgggaataagcgccccgtcagccttgtagcccctcataacagccgacagcgttcccgcgccgccgcactcttcatctacgacactttgaaacaggacatctccttttaacgtaatcccgcaggcttcaagcgcttctaacgcaaacaagagagctgtattgccgcctttcatatccgttgacccgcggccgtaaactttgccgtccttttcaacagcggtaaacggttcatacgtccatgcggcgggatttccttccgggacaacatcaatatgtccgttcagtatcagtgatcttccgcccccggcccctttctttacggctgtgatattcgggctttcatggaagtcttcgcgttccgatacaaaataaggatgctctttcaaatgtttgacactcggctcccatacatcaatatccatgtcaaactgtctcagtttttctaaaacgactgcctgtgcgttaaattcatggccgaacgtgcttttttccccgatcagccgtttcagcaagcttaccgcttttgctgtgttttcttccgcccactcagtgactttcttttctaattgatccatggacaggcccccttttaagaaaacattctcccaatctgatctcggcatccgttgtttgaatgacatcgtctatggtcgtgccattcagcagttcctcaagaacaaaagccccatcatctatgctgatgacggctttctctgtaatgatgagatctgcacagcccgctgctgtaagcggcaatgaacagctttcgaccagcttcggccggcctttctgatcggtgtggctcatgacgacaaccacttttttcgcgccttgggcaagctccatcgccccgcccattccgggcactttttttcccggcacgagccaattggcgagatcacctgtcctgctgacttggagcgcgcctaaaatggtaatatctatcagcccttttctgatcatggcaaaagacagagctgaatcaaaataggaagcacccttaactgtactgacaggaaacccggccgcattgcataaaagctcatcctcctctccgcgctccggactgccgccgatcccgaggacgccgttttccgcctgcagcatgacctccatgccggccggcagaaagttcggcactaaagaaggaatgccgatccccaggttgacaatcatacctgaggtaacttcactggcggcccgcctcgcgatactctctctttccgctattcccaagcccatttccacttcactccttcactttgcacgacaccctccacgaaaacgcccggcgttacaatatgctcgctgtcaagttcgccggcaggcacaatctctgccgcctcagcaaatgttctttcggccgccgcagccatcagagggttcatgttgcgcgccgttttgtcaaacgtcagattcccgaattcatcagcagtatgtgccgacacaaaagcgaaatcagccgtcagcgctttttcaactaaataggactttccgtcaatcgttacggtttctttgttttcacaaacggttgcgttatcaatgccgatatcagttaaaataccgcctagccccgctccgcctgcgcgaatccgttcagcaagcgtcccttgcggcgaaaattccacctcaagcgctccgtcagtcatttgtctgcccgcgacaggatttgagccgatatgggaagcgatcagcctttttacccgcttatgaacgataagcgggccgatgccgatttccggaaatccggcatcattgcagatgacggtcagctctttaacgccgctttccaaaatcgcttcgattaatgacggaggtgaacccactcccccaaaaccgccgaacataatgacagattcgtccttgacatcggcaattgcttcatgaatatcgatttttttatgaaaaatagacatatcagctcaatccttcttcatcattttttcaacttcttctgcggcctgggaaaatagatctgacagctcatccagctcggcatatgaaattgtgaacggcggggcgatgatgacggcgtctccttctccgctgtcaataccgggctttgcagggtaaataagcaggccccgtttttttgccgctttaatgattttttcggtgaaggcctgttttttcgaaaaaacgtccttcgtcgttttatccttaacgaattcaaccccgatcaggaggcctttaccgcggacatccccaatcaccccgctgcgctctttgatttcttctaatttccgcttcagcattacgcctttctcctctgactgccgaagcagctcgtgtttcttaacatagcgaagcacttcaagcgccgctctagcacagtatgggttggcactgtacgtatgtccgctcataatgaccccggagccccgcttgatcgtttcaatgatgtcatcagacgcaacggctgccgctatcggagcgtaaccggcgcctaacccttttccgagcaccgcgatatcaggtgcgatcctccaatgctcagaagcaagcatccgccctgttctcccgagccccgtcatgacttcatccgcgataaacaaaataccgtaccggcggcagacatcctcaagcgcttcataataacctgccggcggagtgatggccgccccggctgctccgacaatcggttctgcgacaaatcccgcgataaatgagggaccgatccgctgaacagccgtttccagttcagccgccgcagctttcacaaattcctctccctgcagctctgaacgatacatattaggcgctgaaacggcaggaaaccgttcgagcaactgggtgaagcggtatctccgttcgtagaaccccgataatgaaagcgctcccaaagtaatgccgtggtaactgccccatcttgatagaaagacggatttttggtattgccctttttcctgccaatattgaacggccattttcatcgctgtttcgactgcctctgagccgctgtttacaaaaaatgaccaattcagcccgcccggcagatgatccgccagaaataaagcgagttcttctgccggagtactggtgaattgcgagcgatacacaaacgaaacggagtcaagctgctcttttaaagcttgtataatatcctccgtgccgtggccgatattgcaagtgaccgcccccgatgctccgtcaagatacttgttcccctcctgatcatacacatatgatccctttccatgactgactgacggataattcccgtcaagctccggtttgattaaatagctccccatatctttccacctcgaaaacccatttgcttcattgtatgaacagatgaataaccgcattcttatccttcagaaagttttttgcagaaaatacctttctgtaaaacaggctgccggagatgtcccgacagcctgaagagcgttctggaaattctattcctattgttgattttattctttgctcagctcatcatccatcatttttgatctgaatcagtataagcagaaggcggaaaattcccgtcttctttaccgtatgggaatcaatatttcacacaaatgatgattcaccttttgtaaagtatacctttcgataatgggctgctctctgattgataaattatttttttcgatctcagaaaaaacagtgttccaaaatccactgactgcctcttttgtatgatcaagcaagaaaacagcgtacttccctccggaaaatgtaccaatccgggctggttcaggcacatggtcttgattgataacaagacaaacatcatagcggcatttctctttaggagtacgattcggatgatcttgcggaattcctaaaatgacagaatgacaaagcagaccattcaattgcgcccagtttttaaatgactccatcagttcattgttttgctttccgccatactctccgatgtttcggaagtaagcaattctggattcaggtaattcttcaatcgttatgttcacattttcgcccccttctccagaaaggtaatatgtattaaaatgtttttcaagctgatttttcagcatgggtataacaaaaagcctgcagaaagtgatgttctctgcaggctgattttcaatataggatttttttcagtctaacaaataaaagccgcaccgacgatgattaataaaataaacaataccacgatcagcacaaaagtgctggttccgcctccgcagccgccgtgcccgtaaccatagccaaaactgccgcaaccgtagccatatccgtatccgtacatgcgcaaatcatcctttcttcttacgatatacggcattgtatgcgggccaactcccaattggtttatgcgaatgcccaactatgtaagaaaataatgaaaaattgtatgcacgcgccgaaatcttttgaagccgagtttttcataaaagcggtttacaccgtccatcccggacgtcacaaggtatacggtttccatgccgttcagctttgccgccgccatcagctcattcatcaatatcgatccgtagccttttcgttggaattggtccagaattgcgacttcttctatttttgcggttttatctgctttgttgatgaaaagctctccgcagccgatcggaatcgtttgcgaggcgtcgctgtagcacacgacaagcataaccgttccgtccttatacaaaggatatttccgctcaagcttttgttcggccgccgcctcgccaatgtaaagggcatcatagatgttcataatagacgacccgtcggcgaggcttttttccgtcccccaagcagtgagcgggtgtccggcctgcaggtccccattttccagtttccttgcaaaaaacagctcatcttccactacgcagccctgctttaccagattttgtttcagaagaagcggaaacgcgtgctccggagccgctttcacatgaatataattggcttgaagcatgcccggaacggacgaaaaaaacggcagcagtttgtctaacggaaatgtacggtgcagctgaacaaagttatgcgaaaaaatctgcggcaaaaaagggtccgtatatacactgaaatgctcgaacctctgaatgccggaagtaagctctatatactgcttctcggttttatcaaattgatcggtcataaaagctctccttttccttacacatccaactgcatccctcaaccttttgttatattgagatttctcataatttcatcgtacaccggatagaacggcattccaattggtaattgtttaatttgctgaaaggaaatgggtatcgccttctgattcgcaaaaaagcgtttcgctacgtcatgactgatcggatggagaacccctctcaaataaacataaaattcccgttcaatgcgaaacagcattctcccgggcagatgttgaatacagcccgatgtcccccggctgatcggcggaccgtccggaagcgattgtatttcggcccgctctaaagccgggatgtcatgccgtttaaatcggtaaaagcgaaatgcgctatgatcaaccagccttttctccccgtcttctataaaataaacatgaaactgatccctgacgagctgaaaattcggaatactgacggagttctcttcctcatattgaaataaaaacggatccggaatgacgacggttcggccttcatataacgaatgccagcgctcgtttacaggcttccttttatttcggtcaagctgatatactttctgatccgtcccctttacaaaggatccgtcgatcaggacagacggaagcgattgatacgtgttttgaaatgagtggggtgttttataggtcgtatccaacacttcttttatcggcagaaatgatgtaaatgtgttgagcctgctccaaaaaacagagtctccgtgattccaatgcataacatcttcgtcccaaaagctgccgaacttctctttcacacgctcaagcaatgatctccggtgcatcactgaacagtggtcaacgagaaaagcggcctgatctagcacctcttcagcaaaacgatagaagtggaattgttctgttccgcgcccgtttacatgtatcaccttctggctggaatagacggcatcaaactcgctgtattgattaagcgcttccgccatgcggctgagcctatccggatgaaatacggtgtcgtctgtcaaataagtgatgtattcgcctttagcccgtgaaagcgcatcattaatcaaaacggcataccgggtggacttcagccgttcggcaggattgataaaactgttgtcataatatatgcgaggatcttttatatacgtactgatggcagccgaggtttcttcatttgaatgatcatccattacaaacagctcccaattgctgtaggtttgatgcaaaacactttcaatcgcctgtttcacaagatccggtttgttgtaactcgttaagataattgagatcttcttttccatcccatcaccccttctgtaaaacataaaaaacggctccgaaagagacagagcctgatatccgttattaaaaagcaccccagctgacgatgcttgaaatcgcgacgtttgatctcgtattattgagcggattttgaaaaacggccaaatctgacagcacttctttgacaattacgttttgcagtgtgctgccgttaatcagattgacgcgtgatacaggaaccccaagctcttttgccattacaagctgacgccgcaaatctgaatgatctccggacggctgacgggataacaaaagaagaagaagcagtacgagctgaaagtcctcctcaaaacccccgtgttttacagtttcttctgaatccaaagtattcctctccttcattttttaatctatacaacgtatgtcatactcttacaaaccgcataggcaaacaaagcctgattcgaaaattcagctgtttgattaaatattgaaaaaaacacaagcaaaacggcattcgacttataccaatctcttcaatcaggaatatgaataaacgtgaggttgaaattgttaaaggaggtgtatgtccgcatgagcgaagatcgtttggagcttaaaaagaacttattgaaaactcttttagcccctgtatttgacaacagcgctttatctggcggtacagatggaggagataacgtgaaaaacagcgtaaaagaattattggaagcggcaattgatgcaaaagtagatgaagcagcggtgaaagacagtctcagcgcacaatctgtattgggaagcggtatttcattagcggcgagatggatttttgcaagaattcagcccggcactgtcatcagcattgtgatggattcaggagacatgatcggcccggttcaatttgttgcctttgacgaaattcacggaatcgtttttgttacgcaggaaaattccgttacaccggcaggctctgctacaacattgcttgacgtcgacaaagttgaaagtgtcacgttcacttcgtaacagcatatgaacgttttatatatccgttcaggatataaaggcatatacacgtattttgaccgctggatcgaggaaggctttttacagtcttccgtccgctttttttctgtttctgagtttgaggaagataccatccgcagtatacgggcattcaaaccagacatcagtctgatgatgacgggagaccgtattccgtctgaatggcttcaatggctgaagacagaacagattcccgtttatctatggatgacggaagatcctttttatttcgatgtgagcatgacaatcgcccctttcgccgatgccattttaacgatagaacaaaacgcgcttgatgcttaccggcaaatgggcttacagcacgtatattatgtcccgatccccgttaatcagcggctttttaagaaacaacctgctgaagcttctcttcacacaaatctgcttctgatcggatacccgtacccgaaccgcgttgaactggtgaaagcagcggcgaagcttccgtatacgcttcgtatcatcgggaagggatggcgcagacatctgcctaaaaaaatcgccaggcagcaaaatgtgctcgtaatggatgaatggattgcacccgaacgtgccgcattatattacaacagtgcagacgtggtcttaaaccctcaccgttcttatcggtttgcgctcaatcagaacgtacgcggcatcgaaaatatcagtttaaatacgagaagcttagacattgcggcttgtcaggcctttcagctgacagacctttctcccgcgcccccgttttcatcctttgtttcttacagcgggcttgcggattttgcggataagatccatttttatatgacaaacccgggtgaacgtaaacaaaccgcggcgcttaattatcaagagacagtaccggcgtacacgtatgaccagattccggctgtgcttgcggctatccgttccaagactttctcatgaaacgctcttcacatcaaaaagcagcttggataagctgcttttttcatgtttattttccgcttctgtcagtcagttttctcgggtcaacctgtttattgacctgcgggtgaaagccgattttatcagcgattctttcccatggcaccattttaaaattttgattggccttttggccgtgatctatattttctccgtcctgtgcgacaaaaaggccgaacggatattcaggtcccagcccgaaacccagaacgtcaattccgtctgtatcgcttgtgccgtctgtctcaggcccgtctgttatctgaaagtccgcaacatatttgttctgtccctgtctttcataaatcgcgtagctgctgttaccctggcttgatgcaagcaaataacctttcccgtcagcagcgtagtaaatcgtcagtccttcaatatcaggggttaaatgcctgccgtcggcacgatcgataaccgttccgttactgccgccgtccggctcagcgctgaacttccagatggcctcatcttcttctgcgatataaagactgccgtattcatcgtctgctgccatcccttctgtctgagaattcattttaaacgcccttacctttttgccggatatgtatccatttttatcagcatttaattcgtattgttcaaattcgccttctttccctgtcaccatcgcgtaatattttcctgttttttgactgtggtacaagctgaaaccgtatacttcatcaattgctgacgcaatcgggcggtctgggttcgtaatgctttgtaatgtgccgtttttcccgtcaatggcgtaaatctcaatggtattctttccttcagaccgattggatgccgccgcaatatcgactttttttccgttcaacggaaaatcatagcggatatcaacattgttcagcttcccggtaggataggaatgaagcatctttccctctaggctgtacacgactaagcctgattttttattggttgtgatcaatttgctgttctgaggattcttggggtccagccaaatcgcaggatcatcagctgcatcacctgctgtatcaaccggttccgtttccgccgccgcattcacggtaaaatgataaggatcagacagcttatgcttggcctgggaagaaaccgcaccgcatgtgagcatcaatccggctgccgcggttaacaaaagtgtttttgaatgattcattttccttcctccttttatgaaagtgtactttaattgtaaaatacatacaggaatgtcagtgttaagtttttgtgaagattgtccgcatgtgagaatttatgaagagaaaaaattgacgtgagcaaatatttaaaatgaacgtttagtataatgttttatttgtgatttctagtctattaatcgggtaaagcgatatgaaagcgcatcagattaatgtttttctctaatttttgatttattggtttctttcattaactcgctgaaattgttcaacatatgatgcatggtagagaaacgagagttggaggataagccatgcctaaacagcaagcagtagagctacaaccgttttttcacgataaaactgttctcgtcacaggcgggacaggatcaatcggaagccaaatagtaaaacgccttttgctcttaacccctaaagaagtcattgtgttcagcaaagatgacagcaaacaatatgtgatgaaacaaaaatacgcggatgaacaaagactgtcgtttgtgctcggcgatgttcgtgactacagaagagtcaaccaagtgatgaaaggtgttgatattgtctttcacacagctgcgctgaagcaggttccgacatgtgaggataatccctttgaagccattcaaaccaaccttatcggcggacaaaatgtcgcagaagccgctttgctgcaagaggtgacacatgtgattaatatcagtaccgataaagccgtttattaagatacttactactaaccaattaaaaaaagaagcttactctgcactcctttccaaagcagcctccaataaatgctgagcaaattgtttataaaattcatctaagtcattactggcttcatcctgttctatatagcggatactgtaattatctttatggacaacctttattgttttcttcttcaattcctcataacgttggtaaggttccaaaactacacccccgctttcacaggagtattatatgtatgtaatggttcgtctcttgactgttctttctttatcaaagcctcgcaagcttgttcaaatgtatggttaacttttttctttatccagcgttcagtaccgatttcatcaaagatgaaatcggtgttttgtacttgctttactttttatataggtatgtgttaattgattttcagctatgttcttatacataaggaaatcatttatatgtacgacataaactttattctctggctctctaaaccattcaaaatccgcagctatatccacccttttgcgaatttcctcagacctgccttcgatattttcggttcatcaagtgttcattccttccatattatcagttcatttacccgtacttctttaatgcagcagcagcctcgtcaacacaaatattccgcaattccgaaatctttatctccttctttacccatcattcttgtatcttttgtttccaactaaccgcctccttaaaattttcaccgaagaaatttacactccattcagaaaattcaccatatattcacaacattctccatttatttcaaaattaattgttataatatagttgtattacatacctaaaccaagggagatgcttttaatgaaaaaaacagcaattgctttattagtttcaactatcggtcttactggtgcagctgcttcagcgaacgctgctgctaaaagtgagccagcttccctgcctcacagtaatcttgaagccttaacaaatactgatagcttccatgttttaaaaactggcacagatcgcaaaaacggtgtaggcaaagtcaatctagctagaacagggccagactcatggaagactgtagtcagcagcttcacaccaaacaatgtaaccaagatctctctgatgggattccaagaatcaggcgcaacgggcagtgcctctgcggatgtgacgtatgaattagtaaagtcagatggaactgtagtttctactgttagaccgagcggaggaaattattcaagagaacaattttacaaagtatttagcgtcaacacatcaagcatcacaggaaaacaattgtatatccgagctcataataatgacacttcagcccaagtaacagttaatgtcgatgtttactgggactacaattattaatgcattgagagggtttccctctcttttttatttttaaaatatttgtttaaaataataatgcagacttgtgcttaaactgaataatactcaagatgcttatttgctaatcttatatttgactttgttgagttcatccatcaccattttaacggtactcagtaattcaaaaatatgttcttggtatccggtcctgtggtctttttcaattactctctaattatcattcagcctttgaaaatataaatgtgtctttttcatcatctgaatcgtcaaataaaccttggagcaggaatgcttcatatatagagcctccgtcaatgaacgttacttcttcactaagtatcccattgagcgctcatcagctttaacacatcgtcaacagaaaagatcagcggatgaggtgaggtttgaagacattattgctgttcaatatgacattccctagtttattgctgttatctcttatccattatttattgttgcgtttgtttacagcataataaacagcatgtcatgatccactctaaatttgttcttaaaattacgattttaagttaagtttaaactgcattatgttgagaatatcacctttaattggtaagctgatatctaaggtcatacttatacaaagcaggtgatatattgaacaaaataatcggaatgaccggattaattatctccttacttgtgcaagggttctcagcaagtgattcattgactcataagatcgccatggcttgtctatttttgttcttattggtttataattttaaccatactaaggagttctctaaaaagtctctggcgattataggcgcttcctttattgtgctaatgcttggaatttatcaattgctcttttttactggtgattactttgaaagtcgcggtttaaattttggatttatcctcttacttgaaattgttttagttattggattagtgactgctgcgctgagtttaattaagcatattgcagaccgcttaaggaaaacacctgatggtaaagagcgttgactctttgcctttttttagctaaccatttctttttatgccgtctttctatgtacaaaatcaaacgcaatatcgacttttgccggctctcttctgtcaaatgatgaattgactccagacattgcatcttaatggactctttttcatttttcaccagaatttctcgatcaattacctttttgacactttacaaaagatccagtcgcattgctctctttgataagaactctacatttctaatagcaagattgaatattgtttgttaatacacttggccccaacttttgcgtcttagaatttgaaaggcgcacttgcactttaacatttgtcatttcagctgatatggaatcaacccttccagcccaattagggctctcacttttcctcgggagtcggatatagtttaaatcgccaactgatctcccctgttttggaggcaaatccttcataaccgtcgtagcttccataagaagatggctgaggaaggtggacagcaagaatactcatattcgttcttgcagcacttggcgggtataactgcacttatagattagtgccgcacccttcgcatttttcagtttttgatttaccggttcgagtactgcactacaaggcattggacttgctttcatttgagttggagaggcaataacagcagccaataacggtataaccaagataaatcgtttcatctacattccctcacatttttttgttaattccccttactcccgccttgaatattcatcacttttgaatggttagcttcattaaaaggtgaaaaaggcagtactggagctactggtgctgccggtaaagatggaaaatcagcatatgaattagcgttcaacaaggtttctcaggaacattagatgaatggcttgccttactaaaagcaacagcaaactgatcccgtacccttctctaacaaggaggattctatcgcattccataccgaattgagaaattaagaaaaaacacccttcccaacatattacattatgataaaatattacataatcagacgaaatgctaggagggtgatttttttggagcaattgatctcttcttcaaaagttggcttaaaaatcaatgaatggtacaaatacataaggttattcagtgttgcagatgcagaaatcttgaaggaagaagtgaagcaagaaatagagcttatggaagaagatcaagatttattgttgtactattcgctcatgtgttttcgacatcaattaatgcttgattatcttgaaccaaaaaccatgaatgaagaacgacctaaaatttcagacttatcagaagagatcgaaagtaaacaaagcgatctaaaaggaattcttgaatattattttaacttttttcatgggatgtatgaatttgaacagtacgaatatcttaaagcaataagtttttacaaccgagctgaaaagaagatatctattgtccccgatgaaatagagcgagctgaatttcactataaagttgctgaagtgtactatcacatgaagcaaacccacatgtctatgcatcatatcgttcaagcaatagaaacctacaaagcacacgaaatgtactcaataagagtaatccaatgttcattcgtcatcggtctgaattatttagacatggagtatccagaaaaagcaataccgcatttcatgaatgcattaaaacaagcacaagaaattgatatgccacggttaataggttcttctttgtacaatctcggtttatgctcatttacaacaggacatatggagaaggcattggagtattttaaagaaggcgtgtcaatttatcaaactaattctcttcacaattctagccgactgcttgacatacttttaatgttggcaaaaacgcactttaaattgttcaacacgattgatggaaaacaggtttgtaaacaaggtctcacgctatcaaaggagttgaacgatgacgtattaggaaaaatgtttgattttcttatgggtttattcgttgagaatgacaaagaacgactttttaaaatcttagattacttagaatcaaaagctatgctttcagatgtggaagacctagcgactgatgcagcaatgtattataatgtaaatgaagaccataaagtagctacagccttttatgagaaagtgctttatgcccgaaaacaaattcagagaggggattgtctttatgaaatttaaatttgcatcggcttttatctttttagttatcttacttgggcttgttggacattatcttcttgacggccacaaagtttttaaagaagcccgaagaggccatacagccagtatccacatcgcgcttgatcaccataatgacttctcagcggaacgccgagggcaaaccgcataatgttttggcactcccatataagggggtgtttttttatgctctgtgttcacctgttaaacctgctctatgcaatgttgtgctccaggtgtataaaagatcgcttttgatctgtatttatttctgctcaaaaagaggaataaacaaatgtttactcctctaactcaagaaataacagggccttcctcatttcaaatacaattaagagactaattcggaactctaaaggtttaccctttgtttgaaatattaaagcatactgctttgttcagtcatctcctgatagaatattttattccttcccatcctaagcccgatccctccccccaccaaaaggcatagcgtctatccgataatcagaaccatggtttaccatgactcaaccaacatccaattaatttatagctttaaaagccgcatttatattctgagtaaagattccaacttgtaaaccataggatacatcattagattttgaaatagcgttttcaagatcttcaattgaaacaacagggccaaaaacttcacttagtagcaagccgacagtcgtgaggtatgcactcaaaacctgttggataataaaatgatccctctctttttccaccacaaagcaagtctgcccctttttcaaaatcctcatttacccaagactcaactctatttgcttcttcaacagaaatcgtaggcctaatagatgaacaggattttagaacaacagatattggttgttgtataactaatgcacccgatagtttaagtaacccttcacaatctttttaggcctaactctgatttaatgtgtggagtggtttgaaaaagacgctcgcccttttccatgatagaactaatggcctctaaattcatgaaggagatcacttaactcttcgttctttttaataaaatgataaaggtaatcctctgtaataataaactgttttccatgcttatgtttagttgctaaagtctgtttaccatcaccatcggttattcgaaagctatgaataattctatttctcatttcaatgatttcagaaaaacacgaagtaatttttgcacctgaaaacttagttatagtttcctttattggttgactaagttgaccagaagtatagtcaattaattcttgccaattaaacctgttttccacatcatttttaagtatattttcaatgataaatgcattgttagagttgaaaacacagattgcgctttttaacaactccctatactttcttgacggtaaagattgcttactatattcttcatacattttcactattctcctcgctgttcaaggtaaactttattccttttattcattcataaattatttattaatctcgtggcatggcgctaaatcatcgaatgttctcatcagcgtttcagaggatttaccaagttaatcgtcccaatcttcgtcctcttcccaattttcttttgcttcttcaagctcttccaagaaaaattgcagaaagttatctgcaaccttgtcaccataaccggcttcatttgcccaaactattacaggacattcgtcgttttccattttgtttgtatcaaggcaataagagaattcatctacatcttctataacgataataccgtcacttaaattataataagttctatattcctcagtaactgtaacaacccttgcagaaactttcccatggcctagtatatttaccccgtaaattccaccggagccatatttatttaaaaaccacttataactctcgggaagttttacatttaaacgattttgtatctctttgattttttcttcacttattccgcctgtaaaatcatcatcttcagcgttttctttaataaattcttcaatttcatgataagtcattgttacatttctcctttctcaaattggctcgctctccatttccaatatcttcgttggaagcttttatactgattccgcaactccctgtcatttctaaaactttccccaccttttttcaatccatggagaacttttttattattttgatgaacagaagctggaatttccaccatcgttcctggctcttcttgaattacatgatgtaagttgatttttgtgccatcattagcaaaaggagcgtcaccttttttcataagttgtaaatttgtttttccgctttcagcatcaactttgtttatatcaatatctttcaacgtgtatactcttcgacttacatctttagttttacccgaagcttttaccttccctttaacttcaaaggcgccatacttctctttatttagccaagggagagttaattccttacctgtaaacggctttctactctcatctaatttcttcgcattagttaatagttgatttttaaggttttggctgtcaaccacattgtatggtacgtcacctgccagagcaagatcatatttagagttataaggaagcagttctggaagtttaacgtctttaattttcttccctgcctgtcctgccttgtttatgactttccccgccgcatcagctttgttaacggctcctgcgcctccgacgacagccacagctgctgaaccaattgcatatgtcacccatcttgatcgggaatacgcatctccatttaccatatctttttgatacgactcttcaattgcctctgcaacagcatcatatgttttaacaggatgaagtactgcattccccagtgctgacaaggtttctcccggatcggttatgaagtcccatagaccggttaccgtgtctttcccgacatcatataaaccaacgccgtctccttttaaaatatcccaggtcacttctccggcttcttccagctgttttgcttgttcaagctgaatgacatattgctgctgagaaggttcaaagttttcatagccgatcttcttcgcaatttccaaatattcatccggatcggtcacaccgtcagcgagctttttcttcagatccttgatttcccgctcttttgcttcttccttcttaaacgttaaatatgtgtctgagtgtcttgcaatctcgccttttttcttatgtatgtcgctttccctgtacgccttggcgttatagtgaagcggagtggcgtttttcccttttcctgtagcgttttggagctgctgaaaatctgcctgaatgaaatgttcgtttgcctcggtttctgcgtattctttcgttagatcatgatcaagctttccgagcttatgtatggtttcgcttctttttttatcagctgaagacagcttctgctctgtgctttcggttgaaaacaattcgagcgagataatgtcatcgatctcatccaagatggagcgcatatcctttttctgctcctccataattgcctttgatttactgagggcgtgggtgagttcatgctccagaaatgattcttctacatgagattcggaaagacctgcgtcttcgactttgccgggaaggcttgtgagaaaagcaattttcatatcgatcagatcaagccaactgtctgtgacaccggcgtgatcttgaaaaaaagctttaatgttgtcagcacctttgcctgaaaactcactgtcatctaagtcagccattccctgataggctttcctgagagtgataaattgcgttcttagttccttgtactctttggttcttttatccacttcagaaagtaatgacttcgcttcaaacaccttcatatcattctcctttttctgacactcaacagtctaaatttcaccatagtataggagagttaatgctattcatatagttatttttactcaatccattgtccataaaagataaattactgaataagtccttcgctctccaaggtgttatacattactcgcagtgtttttaagcgcgtatttatcgtgctatctgatagatctcgcttcttttcctcatccgatatataaacgttccccttaaattgcacccaatcatcgcgcatatagttattttgtagtgccgtattgtatctcgatcaatagccgtaggagtcggctgttcttatcgtgatgaacgtttgaaatattccgtcaaagttaccaagatcacgaagtttacgcctgcatattcgtttaatcggtttccccttccgaacatcatccataaaaaaagaacgcctcctattccagtttaatagaataagaaacgttcaaacacggtaacggctcacggctaccctgtgccttaatacgcctaagtcatcgactaagtcaacgcaataaaaaacggctagaaacgttgatataacgcctctaaccgccgtagatgattccgactgagctcgaaccagcgacctctaccctgtcaggacgagacacgtattctgactaatctttaacaatcctaaataattgcccaaacccttgtcatatcaaacttcgggatttagtttcctgattgatatttgttgtttctaagtagtttaaaacgtttgtgtgactccatggtgacacgaaaagacccgctgaacaatttgttatggagtaacaaaacaagactccatcattgccgacataattaaagtagtgtacaaatcaacataccttcaccttgagggtatgcaaaagaaccgtttcattgactaaaatcaaattgagttagttcgaaaaacgcgacttcgaaaatttaggtatcgctcaccttggtctcactctgcatttttgtagactgaacgattcttcacccagcaaaaggaaatgtctgttttgatccaaaaggcaatttgttcgtttgctctaaggagatacactatatacaatatatagagtggacagcagcgcactaggttcggaagagtgttccgacctttgacctgatcggaataaagttccgactgatattctctttgttcaatttcatcattcctttaatacaggtcgttgttatttctctagattaaatcggtctttgatcttttctggcagttttatcggatttaatagcttcaggttctccagtatatccgtcatggctcctcggcacacgtacaatgtccccttcttgataaggcttttcaacaaagaaagagaccatctttttctatcctttctcgttatacccttctaaattgtaaacgtagttgctaaacttatgaacccagcagctcctataattgtagatataatgtaagtccaattaagtaaatccataagtcttctcccctaagaaaaattcagatccctctaattaaattcgtattttaaggagacaagactacggcactctcttgtcccctcaattttttgtactaatttctccaaaaatttaattgctctgctacttccaaaataccttcaattcttcttttctttttatcaatcattgttgctataaacttatcaaaagattcagccggataatgtggattttttctattagtgtaaagctgtgctgcaaatgtttgtgcgagagatgtaaaagcataacttttgttgttatatttattaatattcccatataaacatctcaattgttctatatgctcattcaaagttaacgatgaaagatcgtgatacgtactatgaactcgttttttgaccatttcctctatttcatggctgtttgcctcttcaacagacgtgtttcttcttacataaattctgtttactttgattcctgttgtttctttctttgctaagaatggaatgtatctcaattgctttggaatgtatacaaccaaaaaagcttttcctttcaaatcaccgtaaacatcttcgtcggagtattttaaaagttgagaaaaaaacttaagctcatcaggtacataattcctcaatttcttctcaaaaactgttttatcaaagttgtcatctaattgtagcccaactggcttatattctttatcttcaataccaaaaacaatcattcctccacctgaattcgccattgcaaggagaagctttgctaatttaaattcttcaattatcttctccttataatcaagaaaatttgtctccccgtataaggaattgacaaactctttaaatgaacccacatcaaatttttcgttttttattacatcaaaaaaatcttggtagcctatttgctttatttcatccattgaatatatacctactttactttaaagtctaagttcacttaaaaattcattagttaatatcaagcagttgctcttttttcttcgcgaactcttcttcggttattattccttgatccctaagctcagcaaattgtctaatttgttcagggatatttgagcttgaaaaagacacatcattcatattttgatttgactgctctgctatcttttcttgaagataggtgaacatttcgtcaatgcttccttcatcaattgttgaaactgaaatttctttcccggcataatcaaagattagtttataacccgttagcccacttttaacttttacaagatcaatcagattataatcaaattccacaatctcgtactttgcatatttatcaccataatgcaataacctatctggcattgcaaaaagaacgccggcatttcccatgaaaccatttagattccctctaacgaaagtcactatttgatcttgatttattcgattggctgcatgactaaatattttttgaagatctttcgatggttttttatattttttgctcaaggaactatagacttcctgaatagggtttgggaatgaagtagcttgaactcttgcctgatctgaagatattgttttatttttagaccttttagaattcacggtattactataagaaatacccgtacctggaattcctacagtggttgtggttctacctttagtgtttgttgatatacgtgcccctttaacaccggcactgatgccgacactttttgagttaatgttcagtttaactcctggagcaattttgacactttttctaaatttaaaccccattgtatacccctcacttttggttagttaatttttcctatgccttactctatcatcatttgattattttttccatctgctatctccttatatctggttaaagtctcttccattcaacatactcaaatcgatgctgataaaggtcttccaggattgcggcccattcactccagtacacctggacactcctcacctagtaataacttcaatttgtcttatggcagaagtggctttaaactctgtatgtagcccgtttgagatcactaaagcttctgacattgtagtaaacttagaagcgccatgacccccttagatactatataaccactgccttttaatttaaatgacttgaagtaatagtaattattattttcaaattaaataataaaaaggtatcgataaccggcatagctaactcctcttcagcagaccagcaatttttatggccagtggcagcaacccaattaatatgtaaaacaccatgatatttattttattcttaaagaacagttcaatcatattttgctccatacctggtggaaatgaatcaatcagttcctgcttaaactcttcatcataaacctgatcaacaaataaggccttaaatcccgttagaaagccaacaccaagccagagtattaagaaatatgctattccaatcaaattaaagccctccttatatacatcgtctggtattatagtagtgttaaatactttgtgtaggtgaaataaatgaaagagaaagattttgagactaatggctacgatgtaacagttgtatatgattataaggagtaccccgatgttaaatatggacgctgcgacaattgcaattatactttgttcaaaagctctgtaaaaagcggtatattcttgcgtgaatgtcggcgatgtggtatgaaaaagagcatttagtttaatgctcttttcagtaaaactctgtgtctatttcataaattttaatagtaggaacaactgcttcaccatcaaaagtttcgatagtctcctttccaatcgcagttgctttaacaccaacaagaacagatcttttttcagaagtgcctgcttcaatttgtttttttaattcccaggttatactcccaacatcacttttcacagtttttttcccgatataacattttataatgtctttgtttgcatctcttaaaagaaaataagggttagccaatttaagatgtctccactctgacatccatagataacctaacaaataaaaagcatgaccaagttttttattttcaatatcattacttaattttcctcgatcctgtatcaagtaaagaacacactgatcttgcaattctccatatatctttctttgaatctccttatcatatgcagcaagttcttttttcaaagtaaagaaagatctcacactaataagcttttgaatatatggtttagtaatttcctttattgatttatttacagttacagtggcgcgattggaaatttctgtattataagacccgctattattaaaataggtttgctcttcttctagtggcacaacccactttacctcattgtattttgtccttttttcatttacttcaaatacatccacatattcatcaggaattagataactacaaccatttatatggttgtttggcttaccgtttggtagtctccgcaaaaagaaatatggtttagggttcttaccacaccccttattatgacttaatttagcgttgcaatttgtatttggacaataaaaaacttggcttctatccttcattatttttgtaacatctcttgcataaatcgattttaaagttccatttacctctatatgtgctttttgaattgatcttcctctccccattgtagttacttacctccattaaattttcttttaattacgaatgaggatgggaaaagtttcaaacttctttataaaacacttcttttattaaattttattttttcccctctctaaagccatataacatttccctaaggactttccctgttataatttggctctttttaacctcgttgtctgttgagtagtaggcatcttccttatctttaaatttagacaggaattgattttgattgacttgaacataatcagcaaaatcttctttttctgcttcagaattgaatactaagattacttcaaagaaattccttcgtgctattattccctcataattttcttcattaagtaaaaggtcattcaatttataatcgttttcattatgaatataatatctaaaactaaacttttcatttatatcaaaaacaataaaaccccatttaggagtgactactctaaaacgaccagcatccaaaattgctgtattgtatccctctaatatagttccattaaattttaatttaatcttttgataacttgtgtgctcattatccatacagtatgaataaaatgcaggatctccactttcatagtcgccatattccaatgaatattcgggattatagaggtgataaaaacccacttcattttcaacccaatcattcgagttatttagcagaaatgatactctttcaattactgtcttgttcaagccaaacctctttttccataaagactctatagtagagaaacttgccccttgatcaattggtgtatttgtatcaccaaatctgctgtaaacaatgccttgtttaatttttttataactttttccccttttggagagaataaatggaactgaataagaatttaatataattaatatgtccaatgcttttccttctatctcaatatgttcaagtttaatgtttggggtttccccggaaaaaggaaagctgttaaccatattgatcaaatcagcttgtttttttctttcgtgctcaccaagaccaactacttcaccatcatctttaacaccgactataataaaacagtctcgatcatgaacagtattagagaagcataaaatatcgtgaattaaaagttcattaaaagaatgccacttttctttgaagtcccaaaagtcaccttctctctttaatctgattaaatctttaactagtctaattaggttataattcattttacttatgactctccccaaaatcgtagttttatatggattgaaagactattgaaaataacgtttaatgattatattcttcaacccccgcagaagataatacaacagagtaagttgaattaccgatcattatattgtcaactctttttattgctttagaataaagtttagaaaggttttgagggaattgataataaagtggttgtttggctatttcactccctataaaatttactgtttcatctgtaagcaagtcctcttgatccggattgttggagtgcatctttatagccgcctctctttcgactccaatgtagtcatcatctgaagaaaaagagtataatttcggctgattttgatttatatatccgaggaaaaacaccgaaattgggggtatgtcaggataacttgtttcaaaaaatgtttttccattcttaaatgcctctttgaaaaatattagaggatcaatataattgtttattccatctattttcgcatcaatgtattcaaatgctttttttgctatatctgctcttccagcaaaagaaacaatgtacttatcctttataatcttaatcttcctgtaatcatcagaaactacctcaaatccttgaccaaaaccgttagatttggttactcttttatcagcagtcataattatgctattatctgaaattactgttatcaccatcgtcattcattcatcatgccctttccataacaaactttattgaatccttggaacacaatgtcctagatgtcttatatctggttaaaagtacgattttatgtggactcagaaaatttgaaagtatttactgttcttgtaactttagtataccatgatcactttaagtgatcaatatcttttttgtaaatcaacagctcatgcaattcaatgtctaaatatgtacagactttatccaacagatcccttgggtatcgctccatttcgtcatgatacagcttcctgactgtgttaaaaccatgattaatatcattggacagctttcgaatactgatattcctttcgtctaatattggctttaaatttgatttaatcaatattactacctcgcattcattatgtatgatcactttaaattatcattatatccataaaaaaggtcaaggatataccttgacaatgtattaagcttaccaatcaaatgaatcttcatgttcaaacccataaatacctttaatccacacatctccgcagcctggattttttgtaatctctaacatatgattacgattagcatctccctctactcgatctgtagcagtatagtcggcatagttccctacaaactgtttctcactacgtggaaatacccagccagcaagagttatcctactgattttcatatttagagtacacccttctgcattgctaattgtgaatttgtagaagaaccaagtgcgatcataattccgatcaaaataatctgccattgaaaaactctctgaatcctcactcatgtgaaaattcacatttttgtagtctaatgtaagcttcgcctcagcacttggtgtgttaaaactcaatataaaaccaatgcaatgcaaatcacaaccaaaaagattagctttttcattccctctcccccttttccaaattatactatatttgaaataaaggtgaaagaacaggcagaagcttcgtgatttatctgtattcttcatgatatagctagatatacatgtatctatgaatatctacgtgtatttataagtatctacacctccctatatcacacaaatacatcttattgagaacaaaaatatttattttagttcattttcaagaacaaatcttccatttttatgatataatcatcactgcttataggtaaccttactgcttattcgacatatggtataggaaagaggttcttttaatgaatgtaaaacactctaattgtttctttcttgtcaggctttttgctgctctttgtgtgttgattggtcatgctacaagagatctaaacatttctgtctttggctatactccagggagtaaagcaatatttcacaccggcatatcgatcttcttttttctaagcgcattttttcttttcacttcttatgagagatacaagcttaaaggaaataatgtaacggatttttattggagccgaattatcaggatcgcacccgcaatttacacctatactattgcctcaccatcctgttaattgttctaggagctctttcattaacagtattcactactaaagagtactggtcatggcttcttagcaattttgtgttataccctcaatacttccctgacatattccatcacattggcacaggtcgccttaacgattcactttggacaattcctgttcagattagcttttacctggtgttacccgcaatttattggttttataaatgcttcggattcaaaaaaatgattctttgttcttttgctgtttccgcttttagtgtgctgatttctttcgtggctttgaagttcttgccaggtaatgtaatcggcagcctatacttacattcttttttgccgcagatgttttatttcaccttgggcatcttctgggcaaaggcatggagtaagtcaccgcggcatattgttttattcttatcttcaataattttatttttattctttaaatttgaccttctacatctctacatctcagctcaataaacagcacattatggaacttttcatggttcgtccccctaagctatgcaatcgtctggttcggttacaatgggccgaagatattgtggcagctgaaccggttagatgatatcagtatggggattttcatatggcacatggtgatcatcaacatcttcttatacactggaattaataaaacattgtctgattacccgctgatcatagccctaattgctgttactgctgcatccgcatttctttcgtacagaatagtggaaaaacccgctcttaaattacgtaatatcaagaaaaacaaaccagtcaaagcaaggattgcgagctaactgcaagggctgttcttatgtaggcagcccgattcccgttgatgttttgttcaccaattccaatctccagttggcttatacataagctcaatatcaatataggttttataattacccttaggaaatttaaccagaacaatctcaccctttttaggaacaaaatctacatcgttcctccaaaatttaattgttttagctacttccttagtaattggtgttgtgtgataaccatagctttcggcttgactactagagatcacgttgcctctataaacatattcgtcttgtccattacgtgattgaatttccctggttgttaaatcatatgcgtaaatgtcatattccttattctcttctcggcttaaatatttgtcattaagcgcttcactttcttgacttgaatcattgtcataataactttttctttcattttcatcatcgtgattttcctctaattgagtatccacataaacttctgtattgttgttaaatttactacactgaactataagaaataccccgataatacccaaacataaaattattaactttttcatcacttctcctttagtttcttcgtcatccctcatgctgttgtacatattttaaagtaacttaaatgatttttttatcgatacaatgcatatcgaatccttgttttataattcttgcctttccatttgctgcagaccaactttcacttatcttttcaataaaagaaaaaagtttgtgctctaattttccgggcgtaatcttcataacattgcgaaagatttttctatagcgaaaactttcttcaaactcaatcataaattcatttaattgcttattccaagtgtccaacttttgatcgttgagactgtaggaagatcgtttaaatgagtaaggcggatctatagaatagagtgctacgggcatacctttgtaaaggatttctgaatagtatcgagtatttttaactccccagctaaggtcattctcctcaaaatacttattaatctgtgattctaattctttaaatcttaagtatgatttatataaggaaggattctttcttgctctagttacttgagcataaattgttggagctcctgttatcttggcccaaattgtacggtgtgttccatcaccgtaaacagcataaaagtcgtcatcttcataatgaatcaatttcactggtgagtgttgataataagtgtggaattcttctaggctttgttttttcaagtattcaaaagctttttcacatcggccgatgtcaatattatctgtaccgttataacatgcgtgatcaaaccaagacacaccactggttcccctgaaccctaaacccttaattttttttaacggaacatcccgatatagtttttcgctctttccgactttatcataatacaattcatatggatactcacttatatttgcggtttccttcatttccttaatatgaaattcaaatacacccttttcaagaagcaatttttcaagtttatttttcaaatctctccccccaagcagtcggacgtctaaatgtcattggcaactcaagcctataggtgaattttacattttttctttgcgatgataaagaatcgttttgaaaatctaattaaactgctgttttatcttaatttaaagccattaaaatgtgatgatcaacgatccaacaagtttccccctcaaaacttttgccatcacagcttgaaattatcggtctgtctccgaaagctttggcatacgcaatcacataatattcagcagtgatatctatcttagggagaccaccgcctaaatagctcggggagtttatctcctctttttttcatttttaattaatgattattgatcatgcaaataggatctggatatatcgggagcccaatgcttgagaagtcagaatctaaccatgaagtgatcccttctcctcctgagacatggacgattaaatattctttctataagttcagcttttcaaatgatcaggaatgccacgtatcaatcaatggtggcgatcctatcaatttaagagctggacaaggctttcaaatggaagctcatgaatcacctatcacaagcttcaagatttctgagtcaggaataacatataactttttgggggcgcgcataaatgagtttcttcaatccgattgttaatgtctcaattgtcactgggaagtctgcttatgatattgcagtggacaatggtttttcaggaactgtagaggaatggttagcttcattaaaaggtgaaaaaggcgatactggagctacaggtgcaaccggggttaaaggagctactggtgctgctggtaaagatggaaaatcagcatatgaattagccgttcaacaaggtttctcaggaacattagatgaatggcttgccttactaaaagcaacagcaaactgatcacgtacccttctctaacgaggagggtatttttttcgttttttcaaattagaaaatcccaaaatctctacatccttttacaattttttcaatgactatgttatgattatccccaaaggatttttgaaattttcagaaagaggggtttggatgagcaagatcgcttcagaagttgttgctactacactgaatgattggtacattgctataaagaaacaaaaggtacatgagtcaataaaatattactcagagattaaaagcctgttcgatgatatggaagaggatcaagaagttcttgcatattacagtttattagaagaaagacacaaaatgttgctacactcttcacgcggagagcctttacaaaagcacacttatttcactgaagagaatgaaaatttcataaaaagaacgaacgataaattggaatataacttttatttattcgaagcaatgtacgaggcatacaacaaaaattatgatcgagcaattaacttatatggattagcggagaaaaagcttgcagaaattccggatgaaattgaagcagctgaattctactccaaggtctcctacttatacactcttgttaaacaaagcattgtggcacaacactacatcaagaatgcaattgcaatatataagcgacaccctgattataaatgcaaactggcaacttcaacaatgattgcggctgcaaactattccgatatgaaacggtttgaagagtcagaaacatattatttagaagcaatagacattgcacaagaaacaaaggatgaatatttggaagctcagttatatcacaaccttagtatcgtgtattctgattgggacaaacctgataagtgcattaaatctctcgaaaaagctattggaaatgaatcttggatgaattcaaattattatataaattctttattcatgatgattaaggaactatttaaaattgacgaaaaaatgaaagccattaatttttacaataaagcacaggaaagactcatattaatggagaataagatatacgaagccaaaattagcatcctatacaacctatattgtggtgaattaaaaaacaacttcaataattgcatccgttatattgagtttttaaaacaacaaaatgaccttgaaagtgtagatgaattgtcctacatagctgcaaaaaggtttgaatcaataggtgcttttgaagaagcaacaagctttttcaatgaaaaaatttgggctgaacagaaaatgaatcaggtggagggaatcttatgaaaaaaattgtgctttgcgtatctattttaactgtaattttaagtggggtagctttaacgcaattgagtacagattcaccatctaacatccaggtagctgaaaggccagtcggaggttaaaaattaatttagccctactcatatgagtgggctttttattttatgatttgtgatcacctgtcaaacctgctctatgcaaagctgtgcctccaggtgtataagaaacagctcgtaagatcgcttttagatccgtatttatttcttatccagtccataacaaaattatggaagcatgggctggaaaagggtaaggaattatcagaacaactggagtaagcgattcaaaagcataagggcgcagatatctatgataaggtaaaggctcagacatatgctagtagtaaaacaggtaagccttattcagtagctgcaaccaaaaaagcacaaataaatagtattgctctaaacttgtgtggcaagcatacaaaaacacaaaaggaacagacctaaacagtaatggagaagcacttgtcacatctggatattgaccgctcatcaaaaactgtctgctcctaatcatttaatttacttgcagatttattctgcaagtgtctttttattttatataaaagataaggagcgttatatgaaaaagtcttatgttttatatgggatttcaggagttctaattggtgcaatagttatattgttgatcaatgcattctttataaataaaggtgaacactctgtaagtacttctaaaattaatccaaccgaggataaaatcttttttatctattcaaatccactcatcaagaaaagcgtactcatatccacatcccaaggagaaaaattcaataaacgatactttaaggtaccggatatacccatatatccaaaaaaaaccttcttcagacgatatcgtcttgttagctgaacatgaaccatattattacacattaaataacaacaccattaaggaacatcaattgtccaatccatttgctttttggtatcaaggagaggatgttatcgtaaaagcctataatgtcgacaccaatggaaatgaactgaaagtaaatgataaaaagttcaataaaaaatatagcctgactttgcctaccctcgtaaccatgggaggaagcgataagaggtatatttacatcattcaaggaatgtctatgtacgtcattgatagaaaaaaagaagaaattataaaaacgattggattagcttcctatggagatgtatttgatcactctgaaaaatatgttgtggctagctcagaaaatgaactaactgtaatcgaaaaaggatcctggaaatcaaaattcataaaatatcctgatgatcttgaacaagcggacactgtatattacgacaaaaaaagcaacaaattttacgttacatatattaacaaatcccgatacacctgcttacttgagtacggtcaagatttttcttttgaaaaattcgatttacaatttccatatatgaatgcaaagtttaaagatcaaaaactttatgtgatttcacaagaggaaaacaaaaaaggcattggtggctatatggggatttttgatatccgtactaaaaagaaacttaatgaatttgatttgcctgaagaagaaacaaaagtgcaggactttatggttttagattaaacataaagaataggtgcaaagcaaaaagccccttcctgtacgataaggggctttgattttaaattaaatagatgttttatacgcgttaattgcttgatttctcaaaagcatattatctttcgtaaccattccgagattgtatgcttgtttgatgatatccagcacttgattatcagtttcagttacagctcgtcccccagttattctggacttccagtaatcaaactggtgatttaactctgaactgcttttaaggtttttattatcaactactttgccattctccagcgcttctttgaattcagtaaaaccaattgaacattgctgattcgaactaattcctgcgccttctgtcgctaaactgcaaaacgctaaaaacttcggatctttcgtgatattgtaagagttatttagaccttccataacattcaccctctctcgaattttacaacgttgctataaatgattttcatgtttttcccaagaccttcaacttgaatctcatttgaaggaagttcgttcattggaatttctatcacaactttgttttgtccaagtatagggtcatatttgtatatgttcgcttcacctttgtataacaaatttctcccatccactgctttaatgacggttgaatttgtatagcccataaagcgaaccttaatatgcagcttgtcacctttcaaaacatttgttgcatttggtttgctgcttgtaatggattcccaagcaaatttgttgccatctgatgtgacggaaagaatctaaagactgtaaagcggtactgcttcaactgcttttgctctcgatgtgtgaatggaaaacatcgttgtaacagcaagaagtgtaattgttactaaactaagtacatttttcaattctttaaccccattggtattattccacatgttatttatcggtaattccagcgagatatttaacttaaatacaaaaaaagaacctgattctaacatggttcttttcgttttagtaactgaatgggtttttaacgacatataaatgattcctgtacattaagtatgcttacttaagggagtcttgctcccccctatagaaagggggtgatgcttatgtcaacatttcaggcattaatgttaatgcttgcattcgggtcgtttataatcgccctgttgacgtatataaataaaaatagacctcccttaagcctcagaacctgaagggatgggtctactaagaaaccgcatcgagtaagccttttgacggggtgtgatcaacaccatactcttttattttatgcatttcttattaaagaaatacactataaccagtttatattttacagtttgattataacagattaaacgaaaccattggaattatttacaaaaaatttatttattggataaaaccattttttatagatcacacaagtgtaatacttttgcttaagcgtcccagtcttcatcctcaatccagtcgtctttcgcttcttctagttcctctattaaaaactctaggaatgtgctactaacttgtttaccatatccctcttggttatcccaaagaatgacggggcattcaccatttttcatcttgttagtatcaagacaataagaaaattcatctacatattcgataactacgagaccatcagaaaggttataatactttttatattcattggtctgttcgacaacttcagcaccgtgagagtcataaccgagtatcatagtcccgtatgctccccctgaaccatactcagttaaaaaccatttatagctgtctggaagagttacattgagatgctcttctatttctctaatctggtcttcagtgactccccccgtgagaattgaattttctttattttcatcaaagaaagtttttattttcgaataatccattaaactttcacctcttattcttggttctcaaattgctgagctctccatctccaataccttcttctgaaacttttatattgtttatcaagtactggatcatttctaaaactctgtccattcccttttaatccatgcaaaacatcactgtacttattatgccagctttcaggtatctccagcatagtaccaggctcttcttggatcaaatgatgcaaattaatttgggttccatcttttgcataaggagcattaccatttttcattagttgaagattcgtaaggcctttacgatttttttgattaagatcaatatctttcattgtatataccctacggcttacatctctaattttcccttttgtttttactttgccatctatttcataggcctcatacttctctttatttaaccaagggacttttactttctgaccagtaaatggctttctcgttccatccgggattttctttgcattggtcaaaagttcatttttaaggttttggctgtcaaccacattgtatggtacgttatcggccaaggcaagatcatacttagagttataaggaagcaaatctgcaatcttaacatctttaattttcttccctgcctgtcctgccttgtttatgaccttccccgccgcatcagctttgttaacggctcccgcgcctttcgttccgacgacagccacagctgctgaaccgaccgcatatgtcacccatcttgatctggaatacgcatctccatttaccatatctttttgatacgattcctcaatagctgttgaaatggcattatacgtgttaattggatgagcaactgcccctatgataccttcaacaacttcatcaggcttgctgatcagctgccataaacctgttaccgtgtctttcccgacatcataaagaccgacgccggctccttttaaaatatcccaagttacttctccggcttcttccagctgttttgcttgttcaagctgcgtcacatactgttgctgggaaggttcaaggttttcatagccgatcttcttagcaatctccaagtattcatcaggatcagttactccatcagcgagctttttcttaagatccttgattttccgctctttcgcttcttcctttttaattgtcaggtaagcgtctgaatgtcttgcaatctcgccttttttcttatgtatgtcactttctctgtacgccttggcgttatagtgaagcggagtggcgttttttccttggcctgttgcattttggagctgctgaaagtcggcctggatgaactgttcgttcgcttctgtttcggcgtattctttcgttagatcgtgatcaagcttgccgagtttatgtatggtatcgtcccgttttttgtctgctgattccagcttttgatcgacaccctctgttgaaaaaacctgcatagggacaatatcgcttatctcgttaagaatatccctcatttcattccgctgctcttgcatgatggcttttgatttattcttcgcatgaatcaactcatgttctaaaaatgactcttccacaaacgaatcggctaatcccgcatcagatacttttccagaaatactgttaagaaacgcaatcttcatatctattagatcaagccagctgtcagtaacacctgcatgatcttggaagaatgctttgatgttatcagcacctttacctgaaaactcactgtcatctaagtcagccattccctgaaaagcttttctgagattgataaattgttctctaatctgatcatattcttttgctcgcttttccgctgctgagattaacgaggatgcttcaaataccttcatatctgtctccttcccacttatttcatctaaattttaccatagctttattatttgattaacagaaaaagacagtccgttccgactgtcatacacagttttatctcgtcctgtaataattttcagctgtatagtatttccagtcccaaaaagcatccccgttcgacataatatatcggtctaaaaatatttcaaagtttaaatttaatggattatattctgaaccactttcaaatataaatagataattaggatcaccttgattcactctatccttgtcgatcattaaatgacattcttccaacaggtagccaacaggtattccattgataccttcaaacaaaagctcgtattttagttcttcttctatttcttcaaggctaaatagatgaagtcctcttccaatattctcaccctctgaaagaatttcgaaaattttcgcaccattatgctgagaaataaacttcaggtaatcatcaggaagagtgaatttatgattcgactgaaagttttggatttcactaagagacgctttgtttggagaaaaagtcacaaggctctctataatatatccctcagaacaaaacaatttaatagcccctttttcatctaaaagacttttcaaaccattgatagtcttatggacaaagttagtcaataaaaacacccccatactcctcagaataattactgaggatacgaatttgttaatcagtaacaattttattcataattgaagcagcacttgtggtgaacaaaatgtaagtgttatttgctgttttaattactatcctatccgtagagccagaaggaaactctatcctaactctatccttactgcgcttttctcccctcccccatagttaggctcaagaaatacatcgttatttgattggaaatggatttttaattttgaaataaattgttaagtaagaatgtagtgttaatcttgatgacgaaaaagggaattcgtccgtgaaattaaaaataattatgaccaaagatatctttatcgttgattttcaaaattagctctagtattcttcatatattctctgataattggtgattccattctttgtaaccctcccatatgtcgaggaagaactaagctttttgcaaatctagaatcagtaatccacggaagattaatttttttggtaactctattgtgtgagagacttattatttggttattatcctctgatgaatggtaaaatttaacttctttatctagttcattaattttggaagtattcctatttttattatgaatttttctaatatagtcttcttttattctctgattaaagaaagtattattataagaatttaaatagaacagctcatttaaataatctatttctcgggctctttttaatgttagaataccattttcttcccctggaatatcatatgctacactatcgtaaaagagtaaacagtgctggggagatattgggaggaacaactgtagccctctagtaacaaggccaaagccccttccataataattccttccaatataaaatgagttgtaacgaactaatggattatctgatgttatgaactgtcttgatgttttctgtaatatcaagataggttccaaatcataaattagcggggaactttctaaagcaatacctataatattattagcaggttgatttatcttgatttcaaattgttctaaatctacttctttaaaattagggtgtcccttaatcattgttttaatcagtttatcagctgcattttctgctgagtcagcactccttaaatttcttccctcactaactaataaaaaagtaagtagatgttcataatcttctatttcattaacaaagtgtatgatactgttcgtgtctataattttctttaaaattctcgcggcttttctttcaatctctttatctaaaaaatcctcaactactttgtcgtcaccgtagaaattgtttctttggcacatatctttaatcgaagcattttgaatgtataatgaattcatgatattaaatgtgctaattgatttgtcagtttcagaaaaattctcaaataaaatttcggaacatagtgctgtctatttttttgtcccatacttgctcctcccatatccctttactggacaattttactccacctattatttgaattttaattacccttttattgaataacaaacctctaatatatccgaaggtacaaacacttaattaagttccatttgattttccgactttaaaaacccaataatactttcttcaacttcattcccccttttagaatgtttgttctctaattatatcggtaaaccatcaataattataatcctgtatctaattattgtttctaaatttaattttcccaaaatataatcacatctctgtttaagttttgttggggtatgttaaaactttactgggttcagaattcactttgagcttatcattggcagcctgcagctcaaatgattctgaaaaagtaagcacagaaaaagaaacgtcacaagcgtctacggatgtagaaaagaaaacagaacaaaaggaagctgctaaagaaaaaactgctgacaaatctaagaaaaaagacaaaaaagaattggtcgatgttaaattagatagagcagttgatggttacacaattaaagttaactacaacggaaatgtagacacagtctgctacttgcttattgatacacctgagacgaagaaaccaaattcttgtgttcagccacatggtgaggattcatctaagcgaaataaagaattggtcaatagcggtaagctacagcttgaatttgataaaggtgaccgcagagataagtatggaagactgttagcttacgtttatgcagatggcaaatcagtacaagaaacactgcttaaagaaggattagcacgagtagcttatgtatatgagccaaacacgaagtatttagacacgtataagaaagatgagcaagctgcgaaagataaagacttgaagatttggagtaagaatggatatgcgactgataaaggatttaatggctgcgtaacgaaaccgaagaaatcagtaagtgtatctaagccggctcaaaagtcagttgcaacacaccaatccgagacacataaatcgaactcaagcggttcagcatcaagcagctcttctaactctgcacaagcctccccttctgctggaggaacagaacactttgcaaactgcacagagctgagaaagaaatatccgcatggagtaccaagcactcaccctgcttatacatctaagatggatcgggataatgacaactttgcatgtgagaagaattaattattttgaagtcctctgaggcttctttttttatttggatacattcaaaaccactgagcgtgtgagggactctgtggcctatagtggctgattaaacccctatgatacatcaattaggattttatcaaaacttttcttttaaagataacatcatctctgtctcaaataatacctgaagcagttcatctatattaatttcgttctgcttgtaattattcttttcataagtacgaataatttcttcatattctgatcgattatctcctttaatggagctaattccaagctcttcaccgtatcggttaatgaatagttgtttattcatttctttcgctttatcattttcataattacaaaatgcacctgacaactggacgagaaaagtttcatctttagaatttaagttattttcgttacaccagtctacaaaacgatttccagtcatgttatcacctttaattttagtatttaaagaacaagataatctgcagcaaggatgatatattctactgccatgccaattgtttcagcaactcctgcgccaactgcacctttaatagctggcgggatttgttttcttgccatagcagcaacctctttaggagctccggttatatcttcgagaaccttacaaattttgtttgtgtttttaataatcttgtttaccgtggactttccaaacattgtacctaaaatgtcttttgcccaagcattattcgctagtcctctaataaccttaatcgcttctttagctgcggcgcttttagctcccatagtactcatttgatcttgtgagttaccattttcgagaccttttaattcttcagcagcatttaaaatgcctttttctttaactggtgggactgagtattctttagctagtttttgaagctcggtaggattataagtaaattgcacgtcctgtttagaaacacttgctttttgcacttctgaggccgaagctccaacagtagggatggctataacggctgcaagcaccatcaaaagaattttatttaaactctcctttatccctaattttattgttcaacacattgaccacaataccataaaatactaatattttttcctgtttttataatattagtttaaaaaaggcaaggaagtcctgcatttgaaactgttcagaaatcactacggtgatcaaatattcattcacaatttaagatatttttactacataaaaaagactgttctcaaaaacagtcttagatgtttttagaattaacgtatccgttaatttccttaattcttattctgatttttaaacgccaagtgctcaattccttgatccttaaaaacttgacggatgtagggaggtgaataaccatatttccggccaatttcttttagactcatttttttgttgaaatgcagatcgtataacagatcaaagtcctttgctctcctcctctttgacaattcaggataagaaagcttgtccacttttttcgccttaaaaaaagattcagaataccccagtctggaatattaagctcctttgatatttcccccatcgttttaagttctttgtttatggataaaaccattattttatttagtgttcaagttatagttgctcataagcgctgccatatgaggattaaatgaacaaaataaaaaccctgttaattacagtcggcgtttaattaaaaaatgaatacgattagaatagatcaatattcaaacaatacaatccttacaatatattacgttattttcgtgttcaatgtcagacagaatattgtacgaatactactgtttttacagtaaatacaataaagaggaggtgctgtttttttggagttaaaaaacatcgttcattcttacaacattacaaatattttgggttatcttagacgctctcgtcaggatatggagcgagaaaaaagaacaggcgaagatactctaacagaacaaaaagaactcatgaataaaatactgaagtcgattgaaatcccctatgaattaaaaatggaaatcgggtctggggaaagcattgagggccgccctgtttttaaagaatgtcttaaagacctcgaggaaggcaagtaccaggcaattgctgttaaagaaataacaagactcagccgcgggagctacagtgatgcgggacaaattgttaaccttcttcaaagcaagcgattgattatcattacaccatataaagtttatgaccctcgaaaccctgcagacatgcgtcagattcgttttgaattgtttatggccagagaagaatttgaaatgaccagagagcgtatgacaggcgctaaatacacatatgcggcacaagggaaatggatttccggactagcgccttatggataccggttaaacaaaaaaacatccaaactagtcccagtcgaagaaaaagcaaaagtcgttcaattcatctttaacatctttttaaatgggttgaatggaaaagattatagttatacagcgattgcttctcacttaacaaaattacaaataccgactccatcaggaaaaaagcgctggaatcaatacacaattaaagcaattctgcaaaacgaagcgtatatcggaactgttaaatataaggttagggaaaaaacaaaagacggtaaacgaacaattagacctgaaaaggaacaaattgtagtatcggatgcacatgcccctataatagatcaagaacaatttcaacaatcacaagataaaattgcaaacaaagtccccctgctgcctaataaaaatgcattggaattaagtgaattggcaggcgtatgcacttgttctaagtgcggtgaaccattatctaaatacgaaactaggagaacgcgagaaaacaaaaacggcacggaaagtgtgtatcacgttaaatcactcacttgcaaaaagaataaatgcacttatgtaagatataacgatgttgaaaatgccattttggattacctctcttctttaagcaacttagataataagattttaacaaaacatatcacttcaatgatttctaaatacgaagacgtaaatagtaatgtgaaaacaaaaaagcaaatgtctgaacatctatcacaaaaagaacaagagttaaaaaacaaagagaattttatcttcgagaaatatgagagcggcatttacactgatgaactttttttgaaaagaaaagctgttttagatgaagaatttaaagaactccagattgccaagcatgagctcaatggaactcaagaagcgcaatcagaaatagacagtaatacagtcagaaacaacataaataggataattgatcaatatcacattgaatcaagcacagagaaaaagaacgcgctattaagaatgatcttcaaagaagttatcgttacgatgacacaaaaaagaaaagggccaattccggctcagtttgaaattatccctatcctaaggtttaatttttcgttatcgacctcaccgtcactgatagtccctcaaaatacagtaaatatcttaaaaaaccgataaagccgtttccccggtaaacacaatgggagctacgaagctgttgtccgaaaagctgtttcatcaggcgaatcatcatgttcaaaaccgcggtacggtgttttgttcggtccgcttcggcaatgtgctcggttcacgcggttctgttattcctattttatttgagcagttgatggcaggcggcccgctcaccattacggataaaaacatgacgaggttttttatgtcgattgatgatgccgcaacgctcaccctgcaatctgcggcgattacaaagggcggagaaacatttatttttaaaatggagtccctgaggcttgaagaactgcttcacggatttgaagaatatgcgttccggcacggactgcctcgccccgccgctattgaagtaggaaaacgccctggtgagaagcttcatgaagaactgacctctcctcatgagacggaatctttatatgaatggggcaatctttacgcgatattgcccgaccccgccaaacatccggaatttcggaaggtcaatctccccagatatcaatccgatcaggcgccgctcatcacaaaagacacaatcgtaaagattattgaacgattacatgaagaaaaaaaaacatagaaaaaaggcctgtctgataggcaggcctcattgctgagctctatttttcaaataaatgcaggcaggcttcatagccctcttccttcagcttgtctttcggaataaaccggagtgccgcagagttaatgcaataacggagcccgcttggccccggaccgtcattaaatacgtggcctaagtgggaatcagctgttttgcttctcacttccgtccggatcatcccgtggcttgtgtccagtttttcgtcaacctcttcttcctcaatcggttttgtaaaactgggccagccgcaatgagaatcgaatttatccagagaagtaaacaagggctttcccgatacgatatcaacatacagcccctcttctttgtgatcccagaattcattttgaaacggcggctccgttccgttattttgtgtgacttcatattgcatgcggtttaatgatttgattttttcttccttattaaaagccatcttatctgtccctccaatgctcatcaagaaagccttgacgtccggaacctacacggtagcgcccgtagtgatcaggatttttcttataaaagtgctgatgatagccttccgcttcataaaaaggctcagccttcaagatgtctgtcacgatcggctttttaaatatgccgctttcttcaagctgtttttttgaggcttcagcgatttgtttttgttcatcattatggtaatatatcgccgcccgatatgaacttccgcggtctgcaaactggccgcctgcatcagtcgggtcgatctgctgccaaaacagctcgacaagcttttcatacggataaatgtcaggttgaaatgtgatttgaacggcttctctgtgtccggtcgtttcactgcacacttcttcgtaagtcggattctcagtatgacctcctgtatagccggacaccaccttttcaatcccgggctgttcgtcaaacggcttcaccatgcaccaaaaacagccgcctgcaaatgtggcgatttcttttttttctgacatacgggtgccctcctttgttcatacgtggtattattatattatagcatgtataaacagaataaaaataattctgctttcaggggaagctaaacgaatgccacgctgactacatattggaggttcatgatttgaaagtaaggacacaaatgatgtatgatatggaagctttgcttcgaaaagtgtttaaacaaatcagaaatgaagttaatgaaattctagataaagagctgtccaggaacgaattcaccattttgcggattctcagtgaacaagggcctaaaaaagtaacggaattcgcccccattcttgaggtctccgcaagccatattaccgcagtgaccgacgctttagtagaaaaggaatggatcacccgcatccgttctaaagaggacaggcgaattatcagaatccatattacggaagccggggagaaaattgtcgatcatttcaaccagaaaaaaacagaatacttttttaaacggtttgactgctactctgatgaagagctcgcaacgttaatcaaactgttcagcaagctggacaaaaaacgctgacacgaaaaaacacaaatccctgaaaggatctgtgttttttttatgaaaacttattgtttcggatgataataggaaaattcaatttcatccgtgtcgagattgattttatccgcttttacatacatgccgttgtctaaaggcatttccgacagacggatctcgatgcttttatccccggaatgaacgtgcacaaatgacgggagttcataaaagctgtccatataattcaacacaaagctgatcggcaggcttaattcgcctaaggaaaacttcgtcactttcaacatcacatctccgttctcctgtacggacggttcaaatgtgacgaccgcgttaatggaggttgagaatgctttgattttacctgccacgtgcacatcgttattgatgtccactttgtagtcaagctgattcgatgccttctcttttaagtacgcattcacaaacctggcaagagattctttcgagctcgtgatatgaaagccgtactcactttttgtctgatcttgtattttcgcctgctctcccggcataaccaataatgtcacaattaccgctgcggcaatcacattgagtgcgagaagaacaaaaaacagcgatttccattttttcatcatttcaccctattctgctggtaacccttgtttttcaatgatgccgtacaatcgatcggcgatgagtgcatatccttttgcgttcggatgaaaatcatcatcctttgaaatccgtctgcttccgcttttttgactgaacaagtcttcaacattcaccgcagcggcgtggggatctttttccagctcttttgcggcgatcttgttccaatccgttacaaccccattaatttcttttaattcaggcagcgtaaacgtgaatggattatacatgctgacatacaccagctctgcgttttcattatatttgcggatttttgaaacgatcgccttgaatcgtttttcaaaaggtttctcttccttttggaacggctgaaccgtcagctgcatcatattctggcggagcaccttcattaagtcattgccgccgatggtaaaaaagatatagtcggcgctctttaatgatttctgaacttttttattatcaagcttttccagcaggtccgacgttttgtcaccctgcaccgcataatttttaatatctaccgttttcacatgtccctttttcttaagagactccgctgccctgccgacgtatcctgaaccgtcaggatctcctactccttcagtcaatgaatcaccgaccgcagctatgacaatatgatctttcgttttcggttcttcagcgtcagaaccggtgcgctggacagaacaagctgataaaagcaaggccagtccggcgatcaatgagaacattcgcagcttcaatctggttgctccttccccgtctactagtggaaagtgtaacatgttttttcagatttgaaaatgtctaatctgccagtttacttgagctcctcagccgctctgacatctgagaggatgtcatcatacggaactttctgcacgccgtcataatctttaagcaccttcccgtcaggtccgactaaataaaaagaggttttatgtatgacctggtcctctccctccggctttttgacgattgctttaaagctgttcagcgcaaaatcttcaatgtccttttggctgtaaccggtcagaaaatcccagttgcgaagcgaaagcggatatttggaagcaaatgctttcagctgtttcggcgtatccttttcaggatctacactgaacgacacaatccgcacgtccaggttctcagccttcagttttttttgcagttcggtcatgtgggccgtcatcggcggacagaccgtattacaatttgtaaacataaagtcggcaatccagacatgccccttcaggcttttcagtgacactgtttttccatcttggttttgatatgaaaacggttcaatctgatagttcagcgggtcttttatcgttttccccccgcaggcgcacaagagcagcaaacaaaagacggcagcgaagattttcatttttttcatttccattcccccccatggataaaacgcttacagcattcatcataaaaaaattcccgcaccctcccttatcaaaaggaaggcgctaaggaatatgcaccgttatgcgttatgttttaaaatctcttggttgaaaacggcctcgtaatctttccacttcatacggcgcttgacatattgtcggaatgaatacactgttctcacactttgtgaagcaaaaacctctctcaaataaagctcaaggtgctgatgaatttgaaaaaaataatgttcaccttccgtgacaaccggtatttctgtcacttttacctgaatcccgtcctgtcgtttgaactctaggcttttgagtaacaagatatcaatccttctttttcgattgttttctttttattatatacaatctgagaaagcgtgtctgtcattttgcgcgtcgttctaaaaaaagtcagattaacaggtggaacagatcctgatctttattcacctctacgtaatgaaatcctttttgattcatccgggcaatgagcgcgccgtaatcttcccgatgcttaagctcaatgccgaccaatgcggggccgctgcttttgttattttttttcgtgtattcaaaccgggtgatgtcatcatcaggcccaagcacttcatctaggtattcgcgaagcgctcccgccctttgcgggaaattaacgataaaataatgctgcagcccctcataaatcatggagcgctccttcatctcctgcattctgccgatgtcgttattccctccgctgaccatgcagatgacgtttttccctctaatctcttccttatacaaatcaagtgctgacacggacaatgcccccgccggctccgctacgatggcgcattgattatataattcgagaatcgtgctgcacacttttccttccgggacaagcacaacgtcatcgacgacggtttcgagcgtttgaaaggtttcggcgccgattttttttacagccgccccatcgacaaatttatcaattttctcaagttcaaccacttgtccggcttttttcgattcaaaataggaggctgcgcccttcggctctaccgctatgatttttgtatccggcgagatgtttttcatgtacgtgccgagcccggacaggagtcctcctccccctacgcttgcaaaaagaaaatgcggttcaacgtcaatgtcatttaaaatttcgatggcagccgttccctgtccggccatgacatcgggatcgtcaaacggatgaataaacgtgcggttttctttttcacagcattctgcagaactcttatacgcatcatcgaaagtgtcacccgtcaatatgatttcaacaaattcttttccgaacaattccacttgggatactttctgtctcggtgtggttgacggcataaaaatcttgccgtgaatgccgaggtgtttgcatgaaaacgcaaccccctgcgcatggtttcccgcacttgcgcatacaattccgttttcagtctgctcttttgagagctgcctcattttattataagcccctctgagcttaaatgatctgaccacctgcaggtcttcccttttcaaatagatgttgcagccatacctctcagaaagtctgtcattcctctgcaaaggcgtatgtatcacaacgtcctttacattttggtgcgcttttaaaatgtcttttacctggatgagagagtcttctttaagcaacggtttcatttacagagtcctttcttatttaaatccctatttaatatgccattataacatgaatattcaaataataagacaattattttaattttgtaaataaaattaaatgaaccgatacaagagaaaaagatattttcgatcgcacaaacgtgttatacttaaaccaattagaaccaaaaggagccaattcatgagtgtaattgaacaaactgatcctttttatcagctggccggcgaacatcacaccttttcagaagcgaaacgattggcctcgcaatttgccttatctgatttgccagtcttcataacgggtgaagtcggaaccggaaaaaaacaaatggccagagcgatccatcataaatcccgcagaaacagcgaactatttattaccgttcactgcagccaaagcgaagagcggctcgaatatgaactgttcggcgctgaaggcgcattaaacagggcccgccgcggaacattattcttatatgaaatcggagacatgccgctctcggtacaggcccgccttctttccgagctggatgccgggctttctgcccgcatcattgcaagcagcacggcggatcttggtgataccggcgcagaaaatacgttcagccaagatttattttacaggcttcacgtgttatgccttccgctccctgctttatctgaacgaaaaagcgatataccgcttcttctgcagcatatgctgacagccacggggcagcatgttcatatcgatccgtccgtttatccgctgtttgagcggcacacctttaacggcaacatcagagaacttcaaaatgcggcgtactatatggccgcggcagcatccggcagcacgatttatcccgatgatgtcccgctgtatatcaaaaacagccagaaagcgaaaacagctaagaaaaaagaaaaacggctgacattgatggagaaagaagagtttttgtttattttggaatcaattaaagacttaaatacaaaaggcgaatccgccagcagacggagcatatccgaattaagcgaaaacagcacaatgacattatcgccccagcaggtcagaaacaggcttgattacttagaaaagatgaactatgtgacaaaaggccgaggacgcgctggaacaaaaattacattagaagggttgagctttttgcagtcactgcaaaaacaaatcctttaaaaaggaggacatttgattgttcacaataaaagaagaaatcgcaaatgccgtcacacacggaatcggtgtattgctgtcgattccggcgcttatttttctcattatcttcgcggtgaaatacggctcgccgacagacatcgtcagcttttcaatcttcggcgcttcaatgctgctgctgtatctcagctcgactcttttgcacagcattcagcataaaaaaacgaaagacattcttgagattgtggatcattccgcgatatacgtattaatagccggaacatatacgccatttttattaggaccccttaaaggggcgctcggtctgacccttttaattattgtttggtcgcttgccatcggaggcatcgtgtttaaaatctttttcgtgaagcggtttatcattttttcaacgcttgtctatttaatgatgggctggctgatcatcgtcgccattaaaccgctgtacgcttcgctgtcaggccccggtttcggccttcttcttttcggcggcttattgtattccgccggcacaatattttatatttggagaaaggttccgtatcatcacgccatttggcacagttttgttttaggcggcagcgcctcgatgtttttctgtattttattttattgcgtcaaagtcccctttatctgaaataaaaaagcacagcctctctatagagactgtgctttttttatgcacggagccgtttctgaccggccggataataagcgggctttatatgtaattcaatgtcagccggtttcagccgtttcagtaatctgccccgcagcagccggtctgttcccgaagtgctgacaggcacaatcgggagatcgaaacgaagggccagttcctccggattgattttgccgtcttcggacagaatcagactttgccctttttgcagacggacttccgcctcctgaaacatggcatcccggctgtccccgtcacaaatgacacccatcagccgcagccaatttccgagaaacggcatccggaaagctttctcgccagcgataaaaccagctggctcttcaagatgtcccgcaagcagcagaagatcagccgggcgcaatctgggatgcacatacaatacggggccgtccggtatcggctgatcatgatgaatgccgattgccgatcccgacacgtcaatgcagcctctcataaagactttcggccgctcatacaccagcctcatctgtttttgaaaagaaagccgcgggtcaagctctttttgattgatatattcctgaatatttttcatgaacataaatacaacgtacatcacaaggcagccgtaacgaatcaattcttgtccccctgcttaaactcaattctttttctcgtatacaaagtactcataatcgtaagggtttttttcatcttttactccctgtttgcgggatgtcaattcccattcagcttcattaaattccggaaaaaaacggtctccttcaaagacatggtgaatttttgtcatgtagagtctgtccgcataaggaaagagcgcactgtacagctgggcgccgccgatcacaaagcattcttcatcggccgggatcagcttgagcacttcctcagccgagtcggcggtaatacagcccgggaataaagattcgtcccgtgaggttacaacgatgttacgccgattcggaagcgggcgtccgattgattcaaacgttttccgccccattacaatggtgtggcccgtcgtcacttttttgaaatatgcgagatcatcgggaaggtgccaaggcagatcgttatcttttccgatcagccggttttcatccatcgcaaaaataaacgaaatcatacgctgacagctccttttatgtgcggatgcgggtcataatcctcaatgataaagtcttcaaacgtaaaatcaaaaatagaatcaacatttcgcgcaaaccgcagtttcggcagcggacggacatcccttgtcagctgcagattcacctgctccacatggttttggtaaatgtggacgtctccgaatgtatgaacaaactcacccggttcaagtcccgtcacatgcgcgatcatcaatgttaaaagcgcataagacgcaatattaaacggcacgccgagaaagacatccgctgagcgctgataaagctgacacgacagttttccgtccgcgacataaaactgaaacaggcagtggcaaggcggaagcgccatatgatcaatttcgccgacattccaagcgctgacgattaaacgtctggaattcgggtttgtcttgatgtcatgaatcagccgggagatttgatcaatggtctcgccgtccgctccgcgccatgaacgccattgagaaccgtaaaccggtccgagttctccgttttcatctgcccattcgttccagatgcggactccgttttcctgaaggtagcggacattcgtatctccttttaaaaaccatagcagctcatgcgcgatggatttaaaatggagctttttcgtcgtaagcatcgggaaaccttcctgaaggttaaaccgcatttggtagccgaacgtgctgatcgtacccgttcccgtacggtctccttttttttctccgttttctaacacatgacggcacaaatctttatattgtttcatttttttcatccttttaaagtagtcttttagtagtgtaacacaataaaaaatcatttctgcaaaatttctcagaaatgatttttttatttcttctcgctattacacgctcatccagtcaggcggcgtattgcggtcccagtaaatgctgccgagctcatgatgtgactgaaatccgtcttcagcggtatggtaatgaaaattaaaccagtagccgtcttgcgggggatgatcccggcggacgtggaaccttaaaagatcttcacccgtcagcctgttatacacatgaaaaattttttcggtttttccggccgacggtttgctggaaataaccacatcctgatacgcttcatcatcttgaaacttggctaaatgtcctgtgatcacatcttcgattttcggcagaatttcacttctgtaatcatcttcaatgaccggagagattttgctgccgaattttaaaaatgattgattttcagcatcaccgagaagctgctgctgatacgattgaaacagtaattcaggctcccgccctgccttctcttctcccggcagggcgtgttcatcataaaaagcggtgtaatcattctgctcaagactgctcgactgtcctgaaggcttgtctgtcatcaaagcagccggaggagacacgagtccgaacgttacaatggtaaacagaaccacaagggtctttttcatccacaatttcatgacagattgttcccctctgttttattgtcctcttttcctttattttagcatagatgaaagcgcggcgtcatgtccggcagcgtattatcatgcaatatgggaaattggtaactgtgaccgagcggataaaccgcttacaataagaaggagaaaaaggaggggatgagatgattaacgctttatttgcgacagtatcacttctcacgctgctttattttgtcgttatggaaatcactgattaacgaaaaagaagcccatgatatcatgagcttacatggatgacaccgaagtggaaaagcgccgtctttcttttcagcaccttgaagccgtatcgttcaaaccgcgggcttttccaatggtctttaagcactacgcattttttcgccgcccggacggcttgcgtgatgcactcttcgttaaaaccctcttctgccagcgcgcggagcggtgcaatgccgtctgacgtttcaacaggttcgtgaaacatcgggtcaaaataaatgacatctaccgatgaatcaggaagctcccgcaaataatcggcgcagtcggcatgtttgacctgaatgcgtttcatggcggtttggagctgctccattccggtttcccacgtttgaagtcctgtttcaacaagcaatgagacaagcttgtttttctccaggccgatgacttgtccgctttttccgactgccaggcttgccaaaatcgcatcggatgccaggccgagcgtacaatctaaaaaggaatccccttcgcgtaatccggctgcttttaacaacggctcggcttcccctctcaaaaaccgctttgcgcggaacatcgctgtattcgggtgaaaaaagaacttctccccttgcttcgtgtaaagttcgaaccgttcctttccgatgactaaaagatcgctagccgctcgttccagcattttttcaatgggctgtttattgcggctgcagtaagtgtcacccagcttgacactgagcgactgcgctgtgtgtatcgtatattcgcttggtctgtaactcgttgtgatcatctttttctccaaaaagaaaatgcccggaattcgggcatttcagcagtgcgcatcgaaggcatccgtcagatttttcataatttcctccatgtcatgcccttcgatttcgtggcggggaataaaatgaacgacctctttcccttttaacagcgccattgaaggcgaggaaggttcctgccccgtaaaatattcacgcatttttgcagttgcgtctttatcttgaccggcaaatacggtaaccgtatgatcaggcgctttttcatgctgtaaaacagcctgagtcgcagccggacgggcaagacctgctgcacagccgcacacggagttgacaacgaccaatgtcgtgccctctgcctgttccataaagctttctacttcttcagcagtcgttaattcctgaaaacccgcacccgtcagctcacggcgcatcggcacgaccagctggcgcatatattcttcataagccattgacataaaaaagccccctctaaaatccttatatgaagtcaaggatactatagagggggccggaattcaattgttcaggcctctgttttatattttcatgattccgcccgtattggcgcttgttacgagtttggaataccgggccagatatcctgtttttactttcggctcgaagcctttccattcggccttgcgtttttcccattcttcttcaggcacttgtacgtccaaaatccgtttttctatgtcaacgatgacatggtcaccgttttctacgaatgcgagcgggccgccttcagccgcttcaggcgatacgtgcccgattgaaaggccccgggacgctcctgaaaaacggccgtctgtaataagcgccactttcgggccaagccccattccgacaatctgagacgtcggagcgagcatctccggcatgcccgggccgccctttggcccttcataacggataatgacaacatctccttcttttactttgcggtttataatgccttcaagcgcggcatcctgggaatcaaagacgacagcgggaccttcatgtcttgtaatcccgtcctgtacgccgcctgttttgataatggcgccgtccggagccagattcccaaacaggacggccaaaccgcctttttcggtaaacggattgtcaagcggatgaatcacgtcataatcctttacttcatgacccgcaattgtttctccgagtgtgcggcctgttacagtcagcgcgtcaagatgaagcgccccttcttttttcgctaattcattaagggccgccgagactccgcccgcttcgtgcagatcttcaatgaagacgtccgaggccggcgccaatttcgataagtgaggcactcgttcagccacttcgttaatgcgttctaaagagtactcaaccccagcttcattggcaagcgcaagcgtatgtagcactgtgttggttgagccgccgagagccatgtctaacgcaaatgcgttgtcaatcgctttttcggtgacgatatcgcgcggcttaatgtcttttttgatggtctccatcaattgggccgctgattttctcacaaactcttttctttccggtgaagttgcaagaattgttccgttgcccggaagcgccagaccgagcgcttcagacagacagttcatggagtttgccgtaaacatgcccgaacaagatccgcacgtcgggcagccgaactgttccagctcctgcaggtcgctttcaccgattttcccggcttgatatgcgccgacgccttcaaatactgaagaaagcgaaattttgcggccgtcgcttgtgcggccggctgccatcggccccccgctgacaaaaatggtcggaatattaatccgcatagccgccatcagcattcccggcgtaattttgtcgcagttcggaatgcagaccattccgtcaaaccagtgcgccgagacgaccgtttcaactgaatcggcaatgatttcgcggctcggcagcgaatatctcatgccgatatgccccattgcgattccgtcatctactccgatcgtgttaaattcaaaaggcacaccgcccgcttccctgattgcttcttttacgatttttccaaattcctgcaggtgaacatgcccgggaacgatatcgatgtatgaattacagaccgcgataaacggcttgccgaagtcctcttcttttacgccggcagcgcgaagaaggctgcggtgcggcgctctgtcaattccctgtgtgatcatgttgctgcgtaattctgccatggtgatccccctactgtttttagactgtgcactatttttaaaattttcagtttattctagggcgcgttctgcaaattttacagtgtctttgccctgtctcgcttttctattctttctgtatttcgataaaaaccctccaacaattaatattgtacttactatatagagttttgaatcatttttcaacaatattctaaataatttttataaaaagtgaattcaaataaaaaaggtgcatggcgcacctttttgttataactgttctttttttctgctttcagtcatctgtttccagactgaacctttcgcctcttctccgtgctcaatccgttcaatcgccattttgacttgcaggctgacttcgaattccggatcgtcttccgccgcttttaatgcttccagcgcgctttcattgccgacttcatataaaaacatggccgcgcgccagcgcacgagcttacttgagtcactgagcgattttatcatggccgggatggcgctctcatcgccgagatccgacagacagtcacccgccgtccttctgaccgtcaccgttttgtcttcaagcgctttgtataacagcggaagcacagacggcttttcgatcattcccaaataaacgacggcttgtcttctgatcgaagtcttcggatcatgcagcgccttttccaatactggtaaatcgtcttcatccggatccatttgctcaagatgggcatagcgctgtttccagtcttcatcatcaagcatgtccagtgtcactttataagctttccgctgcactgcaggtctggcctcacccttttgctgtgcggctgcttctgtcaggcgtttgagccgctcatcactgtaggcggcctgaagctcttctgtgacatcgtgtccgatttcggtaaaatctccgaagcgcacgccttgttctttccaagtccgctcaaatacaacatttgaagcttcggaacgcagctttaaaatggcttcttggaaacgttccggaaggccgaagcgctcttcacgttcgccgtccgtcaatttgacctgcatcgggattccgctgaacatttgtacgaaaactttcacttcaccgaacgattcctgttcagaacggctctctgactgctccgtatgttccattccgaaggcggaacggacctgaggcagaatttccttccagtcaaaacgtgcgtttctctccacagccaggaaatcggcaacgtgataaacgccctttactccttcaatgtttaaaatatcacgtacgacaaccggagcatcatctgcctgatcgggcttgtaattgttgcttttccctgccggaagctcttcagtcaaaatcactttcatcgtgttcggactcggcgtcggttctattgatttaatcttcatattggtcctcctatgcgcaatctgacacttattctaacatagtcggcacaagcgttctattgcaccgcttagcttttgcaaatgccggcctctttttggatacgggcggcgaactgtaaaagaaattgatgccgctcctctgctaaaccggcccccgcttttgtattcattaagcctttaagcttgattaatttatcctctatatgggccagcacacttgtttgagttccgtacatcggatgacccttcgccccggcaaacataaaagccctgccgatgcccgctgcgccgatcgcatcaagcatgtctgcatcctgaacaactttcccctccaatgaaagcggccgctttatcagcagttccctgtgtctgaatgacattctcgtgataatatccgtgatctcctgaatggagtcagccgcgatgttgaaagcagccagccgttctgtcacttcgcccgccgtcagcctttcgcttttttcgagcttggcgtcaatcagatcatgaaccagcgcggccgtctcagtgataaataagtcggcgccttcttcttttgccatataaacagaaagtgttgcgacccgggaaatatgaagccagtcatggcccgttcgttcattgataagcttgtctctgacccaattcctgacgctttccagctgctctttttcgttcaccgtatcacctcttatcgggccaaaagcctctgcaccgtatcttcaagctcttttgggttgacgttcggtgaaaaacgcccggtgacttcaccgtttcggtccacgataaacttagtgaaattccatttgaccgcttttgtgccgagcatccccttcgcctgctccgtcagatatgtgaagagaggatgagcgtctgctccattgacatcaactttcgcaaacatcgggaatgtgactccgtagtttttcacacagaactcttgaatttccgcttcgtttccaggttcttggttcatgaattggttgcagggaaatcccaatatttcaagaccttcctcccgatatgtatcatagagctcctgaagctgcttgagctgggatgtgaacccgcatttgcttgctgtattcacaatgatcatcaccttgcctctgtaagccgatagcgtcatgtcttcgcctgttatggtccgtacgtttatatcgtaaattgtcatctgcggccctcctttttacattcttcatttattttacctgttttacactgcaaaacaaacggcaaccgctttttccttccacttaacggaaaacgttttattcgaggaaccaaacggctctttacccgtcataataaagagccgctccgaatttatgcccatttgccgcttttatccctgtcattatgcgttaaatgcggtttattacgccgggatggattgaaaaatggcttaaaaatttctataatgaagaaaattaacggggaataacggaggtggcatgttgcctattaatataccaaatcacctgcccgctaagcaggtgcttgaaagtgaacacatctttgtaatggatgaaagccgggcttttcatcaggatatccggccgcagaagatcgtgattttaaatctgatgccgaaaaaaatccaaacggaaacccagctcctcaggatgcttgggaattcacctttacaagttcactttacgttcttaattccgagcacacatactccaaaaaatacggcaaggcagcatctggatgagttttatacggatttttccagcatccgccacaaacggtttgacggaatgattattaccggggctccgattgagcacctgccgtttgaagatgtttcttactgggaagaattgaaggaaatcatggaatggagcaaaacgaatgtcacttcaaccctccatatctgctggggcgctcaagccggtttatactatcattacggcattgagaaagtggagctgccgaaaaaaatcttcggtgtgtttgagcataccgttcttaaaaaacatgagagattggtaagaggatttgacgagctatactatgtgccccactcacggcatacagatattaatacggagcagctgcaatcggcttcggatctggatgtgctcagcgtttcagaggaagcgggggtctgtttaatcgtttcaaaagacgaaaaacagattttcttaacgggtcatccggaatacgataccgatacgctacttcaggagtatgagagagacatagagagaaatctttcaaacgtagaagctcctaagcactattttgcgcccggcgggaaagaacctgttaaccgctggaaagctcatgcaacgttattgtttatgaattggctgaattattacgtatatcaggaaaccccgtatgaatgggattaatttttgttttgagtgatacggtgacaaaaatatgataaaatactcttgattcagtatgcgtataacaaaactttaaaataatggaacatatcaattaaatttagtttaaatatgttgccgcgcttattataaaatgatgcacttgtgttatgtttatctatagacaataactccttacgatgcatgaagcttgcttgttgttgattacattgaggtgaatttacttgaataccaataaaaaagtattaattttgactgcaaattacggaaacgggcatgttcaagtggccaaaacgctctacgaacagtgtctgcgtctcggcttagatgtgacggtttccaatttgtatcaagagtcaaatccgattgtttcagaggttactcaatacctttatttaaaaagcttctcaatcgggaaacagttttatcgtttgttttattacggagttgacaaaatctataataaacgcaaattcaatatttattttaaaatgggaaataaacgtttaggccagctcgtcgaagagcataagccggacattattatcaatacatttccgatgattgtcgtaccggaatacagacggagaaccggaaaagtgatcccgacgttcaacgttatgaccgatttctgccttcacaaaatctgggttcatgaaaatgttgataaatattatgtcgccacagattacgtgaaggaaaaactgattgaaatcggcactcacccgaacaacgtaaagatcacgggcattcccatcaggcctcaattcgaggaatcaatgccgaaagagccgatttataaaaaatacaatctctctcccgacaaaaaagttcttcttattatggcgggagcgcatggtgtgctgaaaaacgtaaaagaactgtgcgaaaatctcgttcatgacgatcaggtgcaggttgtggtggtatgcggcaaaaacagctcgctgaaagaatccctcagtagcttggaaggtgacaatgccgaccggctgaaagttctgggctatgtagaaagaattgacgagctgttccgtattacggactgcatgatcacgaaaccgggcggcatcacactgacggaagcgacggcgatcggagtacccgttattttgtacaaaccggttcccgggcaggaaaaagaaaacgccattttctttgaagatcgcggtgcggctgttgtggtcaaccgccacgaagaaattttagagtctgtcacctcccttcttgcggatgaggagaagctgaaccggatgaaggacaatattaaaagccttcacctccccaactcttctgaggtcattttgcaggacattataaaagaatctgaaatgatggccgggaaggcggatatggcattatcgtaaaagaaaagcacacgaacgattcgtgtgctttttgtttttttccggataagctttggcactggaaaaataaagatgaaaaatagagagcggccgcttgacgcccgctcccatatggtgtatagttgaaccatcatttaacaacgtaaacatacgtacggttgaatgatgacaaaattttttttagcacgaaggtgctacagtactaggaggaattaagcaatatgcaaaacggtaaagtaaaatggttcaataacgaaaaaggattcggcttcatcgaagttgaaggcggagacgacgtatttgttcacttcactgctatcgaaggagacggatacaaatcattagaagaaggacaagaagtttcttttgaaattgtcgaaggtaatcgtggacctcaagcttctaatgttgtaaaactctaaactcaatacatgttgatcagatgacacaaatagaggagaggcgtatgcctctcctatttgattgccgtctgaatctcaattgcgacaagattctgcttgcagcgctgctcgatttcttcaatttgtttctccattgacggcattccttttttcgccatttccgctaaacttcccaaatcaccgtatatttctttaaatgtctgctgaaggattgtttttaaatctttatcattcacggctggtttttcccttctctcccaagataccctgaataatagtaaataagccctaattaatcaggttcaatagttatatcggcttattttctatatttttttctattttccgtacatatttctaaaaaaaatctccaaactatttgcggaggtgttttttaatggactctgaattttttccaaacggactgacggataaacgccagcttgaattagcggtagaaacggcccagaaaacaacgggagcggcaacccggggccaaaattcaactttggtggaatctgcttaccaggcgattcaggatgccagaacgatgtcacaatccagtgaactgcaagctctcgaccaggattttctgcaaaagcagcgaatgcttctcgacgattgtcagcatcagctcgatgaattcgaaaaataaaaccgcagaaactgcggttttattttttattgatttgccagcaccttgccgtaggctttcagcttctcccccaccgtgcattggttgatgcagaaagaatgagcgtgcgtttttccaaactctttgcgaaaatgcttttttacgaaacagtctttgcaatattcatcctgaagctctgtcaattctttataaatgctttttttatccaatatcagtcatctccgttaccttctaatgttatacggctttcaatctgccggtccgagagaatttttctggcaaggtcatccgcttcttgattttcctttcggtttacggcttcatatgtcggtgtcagctttaaggatttgagcagcgcttcaattttatccagccattcgttttgcgtttcatcataacacggccagctgccgtcaagctgatgtaaaacgacgagggaatcccctcttatcgtgattgaatttctgcttgcgccaagttcctgcacttccttaagcgcttcgtataaagcggcatattccgcctcattgttcgtctgaagcgttaagcttttgtttttccgtatgcggtatcgcttgccgccgatagaataatacacgacaattccgagtccggcgcgtccgcttgttttgtcaaagccgccgtcgaaatacactgtaatgtcgtcaggttcgtgcgcaagctcttcagtaagcttttctaattctttaagcgtccagctcgcgcctttttcatcctcaaaataaatgtcttttatataaggaaagcggctgacttctcttgcaagcatgcgcgctttcggaacggtcagccaatcttcggaaaaaaacgcgacagggcctgttccttttgcttctatttcgatatacggcttaagattcattgaaatcaccttaccattcattagttgacgggcgtgtgctataatcaaaccattctcaaattgaaaggaagtcagcaggttttgtttaacgatgtgttatggatcttatttgcggtcattcattttatcattgttcttctgttttataaaggatttggcaaaacgggcctattcgtatggatcggtttcgccacggtgtgcgccaacttgcaggttgtcaaaacagtcgaactgttcgggcttacggcgacactgggaaatatcatgtacggcaccgttttcttcgcaacggatgtgctgaatgaaaaatacggtcccagggaagcgcgcaaagccgtctggctcgggttttccactctgctcgctttgacatgcgccatgcagggggctcttttatataaaccggctgcgtcagatatcgcacagcctgcccttgagacgattttcggttttctgccgcgtgttgcgctcggaagcctcttggcttttattttcagccaaacgatagatgtttatgtatattcagccatacggagaatctttccttcagacaggcttctttggctcagaaacagcggaagcacggcgctcagccagctgctggatacatttatcttcactgccgtggcctttatcggcgtttattccgcgggagtatggttcagcatcttcatttcaacttacctgattaaatttgcggtatcactcatttctgtcccttatgcgtatgcggcaaaacgaatgacaccgaatggagagtgacggatgatgcccgctgaaatttatgtagacggtgcaagcgccggaaacccgggcccgtccggtatcggtatttttattaaacatgacggggaaacagaatctttctcaattccgatcggcgaccattcaaatcaggaagctgaatttctcgctttaattgaaggaatgaagctgtgtgccgcccgcggatttgagtccgtgtcattccggacggattcggatatcgtggagcgggccgcagatcttgaagcggttaaaaacaaggctttccagccgtttgttgacgaaatcatccgcttaaaggccgaatttccattgtttttcattaagtggattcccggcagacaaaaccaaacagccgatcagctcgcaaaaaaagcgattcggctgaataaataaccggaatgaaattgcgtctcactgttcatcctacaaatgaggtgaacagctatgagaaaggaaaataaaggccggctgactgggggcgtgaatcctcagggaaatatggaaggaaatgcgcataaagacccgaaatcagcccttgaaaacaacgcaaaaaaaagcaatacaaaacgctagagggatcagctgatctctctggcgttcagcttttcgagcatcctttcaattccttttatctgatgacgtctgagcattaatgccgcctcttccatctttaatgaaaaaagcgcttcttcaagcgtacagactaacggcacctcgcaatgtatttcagcaagctgccttgacagctccaattctttcaagctttgctgaattttcgtttgctggcccttcggcaagagagcgaggctttctaataaccggtctatgttttggtattcacggatcagcttgtacgccgttttttccccgatccctttaacgccgggatagttatcgctcgtgtctcccatcagcgccttaatgtcaatcagcgcttttggcggaactcccgtttcttctctaaatatctcatctgtatataccttataattgccgatacccttttgcagcagcgctactcgaacttgatgattcagcaattgaagcagatctttatcacccgttacaatcgtaatttccgcttccccggaaaatagggcagaaagcgtaccgatacagtcatccgcctcatagccttttatgccgatgtttaaaaaaccgagctctcgcgctgcttctttcgctagatcaaattgcggaatcagctctagcggcggttcacttctgttggccttataatcttgaaacaaatcattgcggtacgttttgcttcccatatcccagcagcagacgacatgtgtgggctgaaacgtatcaaccgccgtaataagatgctttaaaaaaccgttgacgccgtttgtgggaattccgttttcatttatcataaaattgcgatgaacggccgtcgcgaaaaacgagcggaacaaaagcgccatgccgtcaacgagcagtaatttattattcatatatcgaaactcctttttattcaatgttcctattttaccaaagaaggcggtaaaaaaacagcatccccccatttggaagatgctgccgtcacgttattcaccgtgtcttttattgcttgccatcagcttttcagcttcacggccggcataagaatcaaatttctgtccgaagccgtttttctttttggcattgttattctgctgagcatttctgtttcccagttttgttctgcccatggtcatatccccctttagagaagatacggatagtatgtacagcaagcgctgatgacacacgcggcaggttcatccattactgtctgctgacgaattctttcaccatctcttcacttacgaatcgtctttgcggcacgatgccctttttcgccagctggttcatttttgcggtgatgccattgatggcatctgtcgtgaacggtttattctgtctgcattttacaatggcttcttcaatggcctgttcacgctcataatcaagctgtacaaatgttttgacgtgctgatgctgttttgcggaatgtgctgaaattgctttatggacttctgacataaaaggtttcatctcgctttttttcattttagtctaccacgactgtaatctgcccgccaagcggatttttaaattttcagcatttcatctttctttttccatgctttttcggcttcgtaaaggtgttcaatttcccttgcactcgtattttccgcaagaccttgtaaataagtgtcccgctgctcgcggatctgggaaaggcttttatccgccatgtcttcttgcagacggcgcacctgctcagcatatcgctctgaaaggctttctttctcctgctcaagccacttttctgtcactttttgcaggctcagcctgagcccttctacaaacgctgcttttccgttctgttcaaaaaactgcttcggtgatttaacttcctttacgtgatgtgagaatgccgagacgtcaatgaccggagcgacctctttcagctgaacggcaaattcgttttcaccgctcacataaatggagaaatctccgtcttccataagcttcttctgacagttttccatccattcctcagtcatatggcgctcaataaaaccggtcatccggatatcgagcgttttcagctcttgaatatattcaaaacggaattccttgagcgcttcattcagcgccgctgatatattttgtttccaatcaccgttttgaagacccggatggaaggtggttttcagcatatcattcgcataaaacgtcaggcggtgtttaatgtgatagagctgttcttccgtatctttcatcacttttcgaatgatgacctcagacgtacggcgctttgaaatgtcagcgagagctttttcataggaagactccagacgctgtttctttttctctttttcttctgccgactggtgaagagattcgtgaagctgttccaccatatcgcacaatttgtccgcttctgttttcagctgggcgcagctggccctcattacatcttcctcaataaagtgctcaagcccggttcttacatcagagaacctgttataaaaagcttcttttttacccgcaagctcttctttacttgagacatgatataatttcggccggttaattccctcttttgagagttctgagcggacatagtctttgacggtttccagctcgctttcggttttggccagatcggcggcgttaatgacaaaaaacattttatccatgccgaatgattctttgacgaggccgagtttcttcagaaaagacctgtctccttttgaaaaagaatgctgatagtacgtcatataaaagaacgcgtcagcatcttttatatattgaaaggcaagctccgtatggcgcttgtttatactgcttgctcctggcgtatcaacaatggtgatgcctttttgcgtgagaggcgaatcataatacacggtgacttcttttacgcagcaggccgttttttcttcggctgcgtacggttttaaatcttcaaccggcaccgtcagtgtcagcctttgacggatctgttcttcatacgcatcaaacgcctgcagcatcgtctgaatcaccgggatgagttcatccggaacttttccctttttaatggcataattccatctctctttcagtgaacgcccctttacatcagcatctttcagctcagtcagctgaagcatttcagcgtccagctcctcctccgttttaaaaacgatctccgcagatttatgcggtttgccgtcttgcggtttcgttattttgttgatcgtagccgttgtgggcgtcggtgatgacggaagcacgtattcaccgacaagcgcatttgcaaatgatgatttaccggaactgaatccgccgaataacgccaaggtaaactggcggttttcaagccgctcaatcctgcttcgaaaggcttctgcctgttttcctaaaatgcttgaggattcaagaatcccggcaagctcatagaaccgatcagtctgctcttttataggaagttccttcatcgcatttttttcgggcttgcttacttcatgctgtacagcctcttttggtttcttttggacgggcgcttttgcaaggcgtttttttcgcgtataccagtcgccgcttcccgtatcacaggttaattcttcttcccacaaagcgcggacgcgggctgctttttccaaggcattgcgttcttcttttgccgattgcgcgagctcatcccttattttcttttctttttcgagccggtttttcaagttctcaatgagcggtccgttttttgtctgaacataagcggtcagctcctcaatgagttccgctgtctgtcttttggcttcccttctgatcatttcagcgaggtctttcgtataagttaatacatattcagatgaaaaggccgctccctgcttaagggcctgagcggtgatatcatcagaaagcggtgtgcggtacgcctggattttcttgatcagttcgtccgaatccgcttcataccgcttggccgctttcgtaaatgtgtcgataatatgccaatccgcttccccttccgttctttttttaatatcggcaaaaaattcagcacgccttctttctttttccgaagctgttttcgcttttgaaaagaataatccggttttaaatgagggctgctgtgattcaatataagcagatgcaagctccctcatctcaaagggtgtcagattagcgttttgcagtatgttctgcacgtcttttctgatgtctttctctgctgtttcagcctgttgaacggcttttttaagctcatcttcaacagaacggacaagtgcttcttgtttgtcaaactgctctccgctgccgtttttatcatcttttacgagcaactctgtatgctctttgactaagtgtgcaacttttctctccgttaaggaccataaatttgtttttgcctgctgtttcagcttctgcagatgttttttcagctgttccatgccgtttaaaggatggtcaggctcagtgacagacgtaaagaaaagcgattctttcggtattcccgcgccttcaagcatgtcttccacctgcctgcggtactcttcaaacttcgtttcagtttcatcatgtctgtcaatttggttgacgatcagaaataaattcggaatacggtctttgatggagctgagaaacagcatattttcttctgaatggacgtgattataatgaacgacgtaaaataaagcgtcagcctgatggagaaccgaagcggcagataaaaaatgcgcttcgtccgtcgaatcaattcccggtgtgtcaatgtaggccgcataaggctctgactccttaaagccggcatagacttccaccgtttcaatttgctcaccgtctttacagaattgctgcacttgttctttatcgtaacttcctttaatttctgcataagccccgtccgtcgtatgaagcacgactttatcttcaccgtgccggatgacaacgaggttggcgcttgtgggaatcgggcttgtcggcagtatgtcttcaccgagcaatgtgtttaataaagaggactttccggccgaataatgcccggtaaacgcgatataaacctcttcatcagccgcttttttcataatggccgcgagctgatcggcccgtttttcatcctgatgatccaaaaattgtgcgtataaggcacccgttctgctgaaaatctccctgttatggcgttcttcttctgtcatgtgtctttacccctttgtgtctgtcgcatcaaatgacgtttttcatttttagaaagctctgaaaaaaacctctcccccattttacacaagaatggctcacttttcttcaggaaacgcaaaaaagccgccgatatcggcagctgataaagaaaaaacacccgcggcaggaaaaaccgcagatgtttaagaagacatcgatttattcgaaacttttttcaatacgaaaccaattaaaacactgtatgtacaaacggctgcaaataaaaataacattgtcattttcggcaccaccttgaatgagaatcattttcatatttatatcttatcatgagtgagaatgattttcaatctctattttgcggtgttttcttctagcgctttctcttcggcgcgaatcctcacagtgagcatgcaggcattgagaatcgaaaagagaaacagtgtccaatacgctccgtataacagcggcagaaaaataaattctaagatgacgaccgcgtagttcgggtgcttcatccacctgtacggcccctttctgacaagctccgcatccggcacgacaaggattttcgtattccaataccgccctaatgataatagcgcccaatacctgatcccctgtacaaataaaatgatacatataatggcggcccaccttggagaaagcgttttttgaaacgccgccacctcagctgtaagagagacaaaaaagagcacgtgcattaggacgagaaagggataatgtccttctccgtattcgactgcgcctagctttttcaccttttgctcattgcgccgggccacgatcatctccgcaatccgctgggccgcaagcagcatgataaacagccaaaacattaagaagcccccttgtcccagctgaacagcaaaagctcagacgaaaatcccggcccgagagcgccgatcagccctttctcgttttctttctgccgtccgtggagcaactgttcttttatcacatgaaaaatagttgcggaagacatgttcccgtgtttttgcagcaccttccgagatgccgcaagctgaccggtgtccattgaaagactcgttaaataggcgtcaatgacctttttcccgcctggatgggcaagaaaggttttaatgtcgtgaggactgacaccatattcaaataaaaattcatcaacattgtccttcagccactgtgaaaccagggtgggaatgtctcttgaaaagatgacttgaaaaccgctgtcggtgaattcccagcccatcacaccttccgcatccggcatcatcaccgattgagtggcgaatatccgcggaagaagcggctgtttgacatcgtttcggttcgccttttctcctccgattagtactgcggcaattccgtccgcaaacagggaagttccgattaagttgctttttgacttgtcgttcggctgaaacgttaaactgcaaagttcagccgcgatgacaagcacgtatgcttcaggatacgcgcggcagtattcgtacgccctggacaggccggccgctccgcccgcgcatcctaagccccagatcggtatccgttttgttttcgcagaaaacggtagctgattcatcactttcgcttcaatgctgggtgttgaaagcccggtgctggaaataaaaaagatcgcatcgactttttcatatggaaagggatttgttaaacaatccgggtttgttaaacaatcaagtgccgcatccgcactgtgcttaacggtttcttccgtatacagccggtttttttctgaaaaacaccgtgccgttttataccattcaatcggccggacaaactgccttgattcaatttcgccgttttgaaaggcttttaacagccggtcaatatccttaaatgaatcggcaaacatccctctcgcaaaatccgccgccgtttcttgcgagacatgatacttcggaatgctcgttccgacagataacacatatgccatgcccatcacctctttacataaaggttcccgcttttttcctgaatgtatgcataagtttgaatcgaggatttcactgacatgccattttaataggaaattggcccttttgaataagaaaccgttcgactatacttgatccattcataaaaaaaggttgtgattgggatgctgacacctgtcattcttagagggtcactcgttcagttagagccgatgacgattgatcacactcaggcactttgtgacgctgcttcagaaaataggacgacttacgcttacacccatgtccctgacggaatcgaagaaacaaagcgttatattgagcgcgcgctttccgattatgaaaaaagacttgcattgccttttgcagtacggagtcttgaaacagaccgaatcgtcggaagcacgcggtttatggatgcggaagtgtttacgcggccggcggacgcagctccggaagtgtgtgagattggcagcacatggtatgcctctgccgtgcagcggactggtgtcaatacggaatgtaaacttctgatgctgactcatgcgtttgacgtgtggcaagctgtcagggtgacgctgaaaaccgacgttcgcaaccagcgctcacggactgcgattttgcggatcggagcccaatttgaagggatccgccgcgcacacattccggctgtcgacggcggcctcagagataccgcctactactccatccttcgggaggaatggccttatatccggcaaaacctttctggccggctcaaagcatataactgaaaaacctgccgatatacggcaggtttttttacatattcggatcatggacgtataaattgagatcgatccgtccgtctgacgtgaccgctaccccctcagcttcaagagacagcttctgtacagaaaacatctcttcgtctctcaatccgatttcgccctttgcattgatgaccctgtgccaaggaagacgatgctttttactcatggagtgaagaatcctcacaacctgcctcgctccccgcggacttcccgcaagatcggcaatttgaccatacgtcatcacttttccttcaggaatctgtttgataatggctaccgcccgttccgtaaatgtcatgcaactcctcatttcgactaaaaatgatttccctagtatcatacaacagttttgacgtcatatgatgatgccttactctggaggcttaaaataagatggtacgagttaataaaactcatgggggaaaatactttcttatattcacaaaaagttaacataagtttatatggacaaattttacatacagttatataatacagttgtatcaaataaaaaaagggagtgttttaaatgaaatttaaaaaagttttaaccggttcagctctatcacttgctttacttgtttctgctgctcctgcttttgcagcaagcccgactgcagatggcgggagtcataaaactgcagctcctcaggcagtgttaaaaactatatacatcaatgctaatacacgtggagaacttcttaatgtaacagtatttgctggagttaaatactatttaaaagatgccaagcagaacagtgatggtacatggactggtgaataccaaggttggttttaagattatctaagggataagagatttttctctcatcccttttttcatagttgttttccctactaacctcctaaaaaacacgatcagcgaagagcgttgtgcggcgatcctaagcaaccgtatttcaagctctgtctcagcagcagaccgttgttcctcaatgcattttagcagaatgtctcagtatgcatccttttttgttcccaaccatgccgcttttcctatgacttaattgtgttaattgacaactcgtatttcttggcaaggttcttctatttcatgccttacgcactccttatactccttggtgtgcttttcagccaccaatattcaccgccgcctcttgtattggagattccgaaatgaattcaccctcgcagaatagtttctccagttaggaaaacacctaaaatgaataaaattaaatgtaagggcaataatttttcgtgagcaagtacacataaaacctcttacttgctcttttatttttgataaaacacaatccagggtgataacatgagatttgcttgggaagaattaattataattgcattcggaatgatcttactgagaatttcagggagaaaatccattgcacaaatgaccattgcacagacaatggtgatgatttcaatcggtacgattatcgttcaccccattttagaaaccagtttattgaaaacattaatcgctgcgtctatcctttttagcgctttgattttgatggaatggtttcaagtaaaagtaaactggattgaatcttttttaactggaaaatctaaattcgttatagaagacggccaactcaatatagaaaacttaaagaagctgagactgacagcagatcaactcgaaatgcgtttaagacttcttggcatttcaaacataaacacaattaaatatgccactttagaagctaatggacaattaggttacgaattaaaagatgactgtaagcctttaaccatcaaagaccttaaaaatgtgatcgatccaaaatgtcttaacaaagagcctcagcctcaaaaagatgatcaagccaatatattcaaggaaatcaaaaaacaccagactcagcacaagccaaaaaatcttgaataattcgctgattagtaaagccttttgttattcaaaaccgatgccgaatcagaccgttaaccgccaatcattttttaccgaaaccggtttacaagaaacaaaaaaagcatctgaagcagatgccttttttcaatcgatattgcgacgatgaaaaaagtcggcaacccccgtattttccgacgaggtccttgtatgagcctgaatttcagccgcctatctctaccgccggccttagccataatgttaatcagtttgtttttataaaatcattgattaattgatcagtcgttaatattgtggcgaattcatcatgcaatgttgccagagatatattgtgaatagtctctgcatcataatatgtatcattttgatctctcattccgaaggctgctgttgcatctgaaatcagatatgtatcaaatcctaaattaccgctcatccttgtggttgttgaaacacagtgcggcgtagtcaagccagtgattacgacagttgttatatcatttgcttttaaaagctcttctagattagtcccaataaagctgctgtttacttttttggttataatgacttctttttccataggtttaacgatttcctttatagcaaccccctcattttttggataaaataaagaaccaggtttatcagaagtatgttgtatgtatatgactgtccatcctttttctctccataatttcagtattttgctgatattttcttccgcctttacgttatttcgttctccccactttttatcatcaaagactttttgtacatccacaatgattaaagcttttttcttttctgccatcagataacctcctatattgaaaatccgtatttataacattttaaataaagattttacttttgtacaattgtttcagtgttaaatttcatatcgcaccttccccgttggaaaagcattgaaatatctaaagctagcactcactcaaaagctgcagatcaccagaggccagcaatattcaactctttttctctatatacttatcaatatcctgaaataagccgcaacagtgaatgaaaagattgcccctaactacattcacgctcgcaaaatattaacaaaaaaacccttggttatttttatattgtatgtaataatacaaatgtattaaaaaacaaaggagtgttcaaaatgaaattaaaaaaagttttaactggttctgccttgtctctcgctttactcgtttccgctgcccctgcttttgcatctagccctggtcatacaaatagcgactcaactcaaacaaaaatttcgacacaagcgaccagagattcttttacaatggattaccttcatagatgggatatcccaaatacaactgttaagaatggtgttacatattaccttaagaaagtagagataatcgaagggttctatcgcgcaacttttgaaggatggattaattaaaagaaggggctttcccttcttttactctcttttgtaagaattcgtgcacaagatactcgttcacgtacatatagtccgggacggtttttcggcgaaataaggcggatgcctcatcactcaatttgtttcttttcaaacaatgaaactaataaaaaaagagaatgcctcgcaaaaagttcagcaactttcggaagcatcctcgatctggataaaataagatgttattttaaagaaaacggatgactaaccctcttgaacccttgtcacatcaagggtttttttcgttttaggaatcatattataaataatgttcaaaaggacggcggtaaagcttccggcgacgattccgtttgtggtcagcagatttaagtaagacggcaggtgcttaaacatatcgggaacgacggttacaccgagtcccaatccgaccgaacacgcgacgatcagaaggttttcctgctttttaaagtcaatttgactgagcattttaatgccgtaggaaatgaccatgccgaacatggccaccatcgcgcctcccagtaccgaagacgggatgatggtcgtgaaggctgcgattttcggaaaaaggccgaagagcattaaaagtgcgcccgtgacaccgataaccgcgtttttcttaattcctgtcagctgcacgaggccgacgttttgggaataagccgtgtacggaaaagcattaaaaatgccgctgatgaataccgccaggccttccgcgcggtagccttttgctaaatcacgttcagacaggcgccggtttgtcaggtcaccgagagcgaaatagacgccggttgactcaacaaggctgacaatggcaacgatggacatcgtaataatcggtgccgcatgaaatgtcggcatcccgaagtaaaacggtttaatcatttgaattgcgtcagcattcgccacattgtcaaattgcacttttcccataaaatatgcgatggccgtcccgatgacaatgccgattaaaatcgaaatggatttcaaaaatccttttgtaaaccgataaagcagcacgatgatgacgagcaccgtaaatccgagggcaaggttagccggatcaccgaaatccttgctgccttccccgccggcaatatgattcatcgcgaccggcattaaggtcatcccgataatcgtcacgacagatccggttacgacaggcgggaaaaaggatacgagcttgccgaagaaaaacgacagcagaatgacaagcagacccgatgccaaaatgctcccgtaaatggctgaaatcccgtactccttaccgatggaaataatcggcgctaccgcggtgaacgtacagccgagcacaacgggcaagccgatgccgaaacatttattcctccatacttgaagcagcgtagccgccccgcacataaaaatgtcaattgatacgagatatgtcagctgttctgcgttcagtcccaatgccgctcctacaattaagggaacgacgacggcgccggcatacatggcaagcacgtgctggataccgagtgaaagtgttttggcatagccgtttttcatgaacggacctcctgtacaaatgtcacttttccgtcttcaagcgattggattctcgccagtgattcgacccggcatccttttttcaccagctcatctcttcccggctgaaatgacttttcaatgacgattccgatcccgcaaaccgctgcgcctgcttgttttacgatggataaaagtccttctgccgcctgtccgttcgctaaaaagtcgtcaatgattaacacgcggtcatctttcgacagatgatttccggagacagcaatctgactttctgtttttttcgtaaaagaatagacggatgccgtcagcagatcatccgttaatgtgagagacttcctttttctcgcaaagatgacaggaacgccgagttcaaggccggccatcaccgcaggggcaatgcccgaagattcaattgtgacgattttggttatctcgtctttttcaaaacggcgcgcaaattcccggccgatctgctgcatgagaactggatcaatttgatggtttaaaaaagaatccactttcagcacttgatcagaaagaacaattccgtcttctgctatttttcgttttaatgcttccacaatgattacccccgcttataaaaaataaaaaaagcattgcccgctctccaaaaaaagagcaagcaatgccgaatgatctacacgcaacggccgaataaagccgttccattgctcactcatagtcggacatttacggtgaccggtagaaacttgcgtgccatatccacgcgattatatgagtgttcgtatgatattaatcaaattataacaagatacacttcttttgcatagtgaaatttgaatatttccgaacttttacaaagaattgattttcgattattcgtgtttttagaatttttagaaaaacacccggtgtatgccgggcgtttcgtttataaatataaatttgaatatttgccgacgagatactcaatgagatattgaacgttcagctcttctcccgttgcatcttttatgatgtcaagcggcattttgcgtcttccgtgctgatgaaccttttctgtcagccattgtttgatcggctcaaaatcgccccgttctattaattggtcaaattcaggcagatcgtcaagcatggtatgcttcagctgtgccgcatacatatatccgagcgcataggaagggaaatagccgaaatcgccgcccgcccaatgtacgtcctgcaaaatgccttttgcgtcagatggcggcgtaatgcctaaataatcatgatatttttgattccacaatgcaggcagttcttccactgtcacttcattgctgaaaatcgctttttcaatttcataacggataataatatgaaggggatatgtcagctcatcggcttcaattcggataaatgtcggtttcgcctcgttgacagcgcgtacaaaatcttctcttttcacatcttgaaattgatcaggcgaagcctcaaccattttttcataataggcggtccagaaatgttgatttctggcgataaagttttcataaaataacgattgggattcatgaattcccatggatgcaccgtcagataagttcgttccgctcaacgcttcgtcaatattctgctcgtagatcgcatgcccgcattcatgaatcgttccgaaaatcgccgtgcggaaatcgttttcgtcatatctggtcgtcacccgcacatcgccccggttgattgtcgtcgcaaacggatgcaccgtctcgtccaggcggccgccgtcaaaatcatacccgaactcttttaagaaatacaaggagaggtctctttgttgttctttcgaaaacgttttcgttataaaggaagtgtccggtttattgccggattccgtcacttttttgataagcggaataatcgcttccttcaattcagaaaacagctgatccagcacctttaccgtaacacccggttcgaaaatatcgagcaatgcgttgtatggatgatcttcatagccccaatacgaaataaaccgcttattaaaatcaatcagcttctcaaggtacggagcaaacatagaaaaatcagaggcagcctttgcatcctcccaagccgtttcagctttcgatgttaaaatgacatattctttatactcatcttcaggaatttttttattatgatcataatcttttttcgcaagttccgccgctttcactgtatcttcagagagctcttctgcatgcgcgagaaggatgtcgatcagctctttcatccggtcggatgtctggatttgaaaaacgtcagccgacagctgtccgatgctttccgcccggtcatcagagcctttttttggggctcccgttcttaagtcccaatgcataagtgcaatggcttcgacatagtgggatactctttttaacagatcaaaaaactctttttcatatgtatgtaaatccatatccgttcccctcccttttcactatcaattacaggctaatggaatgccgtgataaagtcaacttcccggatttaaaaaagccgcaggataagaatcctgcagcttttgtttttatacgattttcggtgtaacaggcaagatctttttgacttcggccaagacccgttcactttctccgcccgcataaatggatatggttccgctgtcctgattagaacggatgaggcggccgattccctgccggactctcaagagcatgtacggaagatcaacttcctcaaacggatcttttttcgctccgttccgctttgcggtaaacacgggatcatgaggcggatacggcaatgcccaaatggtcacattccggagcgagtcaccgggaatgtcaagaccttcccataagtggacggaacaaagcacggattcttcatcccgctggaatttttcgaccagactgctgatctcttcatcaccttcgtagtatatcggatacggcagctcccacgcggcagcctgttctttaaattccttcatgtcttcaaaggaagggaaaagaacgagggtgcgtccttcattcttcttaatggtttcaatcgtttcggctgttttctgctcagacgtcatatcaccgtgaagcgcaacagacatttgctcctcgtaatcgtacggagattcaacggtgaatgataaaggatcacggattccaaggctgtcagcgatataatcaaatgaaccgccctcagaaagagtggccgatgagaaaatataagggatctttttagaaaagaccttttctcccaaaacttcggctactgttctcggcataacgacaaacgttgagtctgtatcccgcgtttcaagccagctgatggcatccttttgatacagcgacagcgaatatgccatttgttcgacgtattcttctacgactgacagctcgtacttatcgatcgtatacatttccgattcaaatacgagcgcctcgccgattttatcgagcagacggcacagttcgtcagccgcacgcttaacacgctggtcgttttggatgtccaatcggtgagagccggcgatttccttcgattcctctgacagcacatagaaaaactcatcgtttgcggcaagggcatcttcaatcagttcggcgaattcctctctgatgtcattttgaagcagacgctctaaaaacagctcaagcgtcgactgcttcacgcgatacgttaacgctttttgcgcggcgaattccagcagatgtccttcatcaaacacgacggcgctgtgatccggcaaaagcggcagctgtccttcccttttgcgtgattcttccgtccatacatgctccatgtagaaatcatgggagcaaacaatcagatccattgattttctgtaatgatctctcgaaagtgttaaaccgcatctatgtctcatatcacaagttaaacaatcttggaaggaatcatagctgacgcctgcccactcttcattcgtcaaatcagcgtactgtttgcggtcgccgtacggataaaagcgctgcatcgcttgtgattcgtgtacgaatgaaggcagcgactcataaagatccagccacttttcatcatcagaacgctgcatcgttttctcaagctttttcagacacagatactgctcatgggatttggacagccgtgtatcaatctgcagatccaaatgttctgtcagcttggaaatgtcgccttcttttttgacaagctgttcaattaacgtttcatcggcgcatgcgataatggccggtttacccgtatatctggcatagctgatggcaaacagcagatacaccagcgttttccccgtaccgactcctgcctcagcgaacatgacttttttctctttaaatgcccgttcaagctgaaacgccataaatacctgctcatcccgaaggtcaaagcctttctcgggaaggatatcgtaaaacacgtcaccaatccaattgttcaattcttcgtaaaaattcttttcttttgttaaagcaaaaggcaaacgtgatgttgtcacccaactccaacccctaactattcggcattcagaccatctataatatcatttaacccttttcaatacaacaaaaaaacttggcctcgccaagtttttgccattatcatttccggttaatgatatgtgtacataggaacggatggtctgttgaatgtgtatgttttaccgcattttcaagttcttcctgtgcgtgtgtcatggcggaaggaccgaactccgctccggcttcctccagccggaaagcagttgcgtctaacgccttttgtattttactgaagtgctcgctgttcagcataaaatagatcacctctcaaatagaaataatcatcattctatgccgatgcttcactttctatacatgccattctgaatgatccgcacctgacctgcacaaactacaacagatattcgatcgaatatccatcttcacaaaattattctatccgggagtgatggttacatgagttataaagatcgattagatcagcattctgaattgtttcatcacaattggacgcggccgaaacgctctaaatcgcaagtgaacggccacaccgaaatgtcccagaccaacattattttacggagcaacgcaaaagcgcaccgctggtaatggcagaataaaacgtaaagatgccggagaagacgctgtttcaggcgtcttctctttgttgcggctttttccgctgcggccgcactttagcccaatactgataataatccgttttgataaaaccgttaaagagcttccgttttttggttgcttttcttccgtagacctcttcaaattgttcatttgacgttaacatgtagacagaccatgtatcaagagattcaaatgcccggcccatttctttatacatctgctcgacttcccttttttcgccgagccgttcgccgtacggagggtttccgacgattacgccgtattcgagcttcgtcgtaaaatcctgcacccgcatttgcttgcattcgatcaggtcaccaagtcccgcttcttctgcgttttctttggcgatgtttaccatccggtgatctacgtcactggcaaagatctgcaacggctgatcatagttcgccttttcttccacttcaagacgcgccttgtcccacagttcttttccgatccattcccagtcttctgaaacaaaatcacggttaaaaccgggagcaatgttttgtccgattaaagcggcttcaatggcgatcgtgccggaaccgcagaacggatcgacgaacggacggtcaggcgtccagttggttaactgaattaacgcggcagcgagcgtctctttaatcggagctcctccctgatcaaccctgtatccccgtttgtgaaggcctgttcctgatgaatccagtgtaagtacggctttatcttttaaaagggaaatctccaccttatactcggggcccgtttcttcaatccattcattttgttttcctgattgcagtttcagcttttccgctatcgcctttttgacgatccgctggcagtcaggcacactggcaagcactgatttcacggactttccgataacggggaactttgcgttttccggaatgtacgcgcgccagtcaatcgcttttgttttttcaaacagctcatcaaacgttttcgcctgaaactcggcgacctgtactttgatgcggtcagccgtccgcagccataagttagcgcggcagatcgcaagcgcatctccttcaaaaatgacttttccgttgtctactttgcattcataacctaaatcacgcacttctttggcgacgatcgcttcaattcccatcggcgctgtcgctattagtgtgtacttcttcatcgtatcaccctgtctcttttaagctttcgtttcattcaagataaaagctcccctttaaaggagagctctaatttgtcatatcaataatgtttaacgttctgtaagccatgttttgttccgtcgtactgcaatcggctcatcacctcgtactcaggcggcaatcatctatctacagaaagcattctgtccttctatctgttcaattccttcaagaaggttcccctaccaaaatttgggtttctcgctcgaggggtttaccgcgttccactctcaccatttctgatgagacttcgtcactgtggcactttcaaggatactcagccatatccggagacgtaggcttttttcctgccgtcagcctatcaaggctgccctagcttatttcttcgctaggcacgaacactacgggcatctcagcaccgtgcgagcatggactttcctctacagattcaaagatctgcagcgattacccgaacgttaagaacacttgttcattataaagcaacttgtctcatttgacaagtgcatctgccctattcgtcataaagtttgcttccgaatacatgtttctcaaggttggacagccttttcagaatgtcaaagttggtcgtattggactgcaccggctgttttttgcttgcttcttcaagctgttttttcagctgcagattttcttgctgcagttcttcaatttcttgatgaaaggtttcataatccttaataatcatatctaaaaatttgtcaacgtcttcttgtctgtaacctctaacgcctgttttaaattctttttccaaaatgtctttcgcagaaagctttactttatcagcaagcatctttttcacctcatatcgtgaatcatcatgttatattttattcagaaacacgtcccgttgtcaaatattctctgacgtgttatgtaaagaaatcttcttcttcaacggcggcacggagatcatccatcgtgatcgaataaatcggatatccgtctgtttcacggcgtttttctgcctgctgcagcatatatttcggcgatccttccatttcaggatcatataaaagcaaaagcgcatctgacttttcaataaagaacgcgtttttctgccggaattggagcggactttcgtacggccgatgcgtcaggctctcctcataatctgcctgagcaagcaccgcttcatacatttctttattcggttccttccacttttcttcttggccgtagaaaggcgtgataacggcaacctttaattccggatactcttctctgagatcgtacgccgtttctgccgcccaaagctcagtccccagctgtccggatatgagaatccattccaagccttcgtcaataaagcttctgagtctggtttctatcgccttttttatataaacaagggcccggtcatcctgtttaaaaatcccgagttcaaacggcttgtatcctgttacggctaatactttcaattgatcacctgcttaaaaaatggggctccccatcgggccccattttgatttgctgatatcctaaccgatcttgcttaagcgttcaatactaatgatcgcagcaagggcttccgcactgaaaatgctggtgagttgtcgggtcaacatttgaaaaagtgtgcggatagtaatgaacgtgctcaaagttgtggtgatttacgttagttgtatgttgcggatgaatatgcggcacaactgtgttagaaaaacaatggtgttcacagcaatgagtcggatggacaatcggcggcatcacgtttggtctgcaacaatgatgatgaaacatgctaaatcccctctccattaacttttattacactgttaggttatgaagaaaagagggtgcatgttctaattcaatcacccaatttaaaagtgcgtcagcaaactgtctttaaaattcgaaaatacaaacgcaatcaaaaaaaccacgacaaagaacaagtaaaaaacacctttatacataccaactctcccctataaataactaacgctattttacaagatgcggcaccattctacaacaaaatcgatgcggattcagaaaaaaatatttttggcgaaacagctcggcttttgcgctttcccgggcaatatttcaagaggaatatttcctcttgagccgggcaattctcacatggagcttctcggcttctttttccgatatttccccgtcttctgccgcctgctgcgcgacctgcagagcttttttgtaatcttttgcgtgatgctcaaaatagatcgccagctctaccgctgattggtgtctgcatatgtgaagagcagagcccgtcagtttctcccaaaggggcacggcgtcttgcctgcggttttgttttttataaagcattgctaagtcaaaaagggcccgatccgaatcttcaaaggctttgccttgcagcgcttccagctgtgaaacagcccgatcggtttctttatgagcgataaaccatttcgccatggcgtatgcttcctgacgttctgacgtctgatcagaagatgcaaaaatcttttttgacatatggatgtaaagagcgatgagggaaagcacatcttgttcattatgcgagagcactccctttaaaagagccggatcctccgcctttaaaaattgaaaatacagcatcggcgccaaataaccaggggtgtcttcgtcccttttaaaagcaagctcttcattttcaaccgccgaaagcgatacacgctctaatttatgtttccaaagccgtctcgccccgtgcagaagatcaaagtgaccgaagtcaggaagcttcggaagcctgtcccgcagcaatgtatgcctagtttttacctgcggccagtcaaaggcttttccgttatacgtaacaagagacgtaatgtcaacctcacttaaaaagcttttgtaaagagccgtctcgtttcccggtttaggaagcagatgctgtttaaccgcgacacggtcttcatacactcttgcatgaccgagcaaaaagatcatattgccggccccgccgccgaggccggtcgtttcagtatcaaagaagaacagctggcttttttcgtatccttctgctgataaagtatgtgtcaatccgcctttattccataatgccatgacgtcatcaagttcactgaagctgtaccgtccgtggcggtgcgaaagcggatagacggtttcgcggataagacagtattcatcctcaaaaaagaaaggcttcactccgaatgcctcccattcttctctaaatgggacttgaatatccgggaccgaaagttgtgaagatgccggctttttttcagcttccggcacattcaggtggtttttcatccgctttaatttatttttcaaggacatctttcgtcccccttttcttttacacgtaattcaagagccggagtatcgctttctttgcatctattccttctatttcggagccgatgcaggaaggacatccgtcttgacatggacattgtctgatcaggcgctcagccccttcattgatttcatcaaatcgcttatatacttcatcagcaagtccgattccgcccggataatgatcatacagaaagattgtcggaagtccggtatgtgcggctttgatttgcggcacgacatgcacgtcatttcggtcgcacatgacgtatacaggcacgatatgctgcaggacgtgggcaatgcctaaaagcagctgttcaagcgttttttcgccgatctccgaatccgtctctttcaattcaagccaggcagcactggtatgcagttcttcttctggaagatgaatcggccctgatcctatattttcaaatgtcgtcattttaatttttttaaatattgtcggaagtgcgttcacggttacatcgccgaaatgtaaggctgttttctttctgctgtccgttctgtcaatgtccagcactttcagctgcaccgctaaattggcatctgtataatattcgacatcgacctttcgcacgtacgcttttttatgatcccaatcaagcttttcaacctggtactgcaccccttcatgaagataaatcgcttcatcatgaagaagcgtcatcgcgctgaagcggtccatttctccgatgatttttacatcagccgtctctgaccggtcaacgatgaccacgttttcctgtgacgccgaacggagactgatgttggaggcgggaaaagattcgctcgcccagtgatagcgttcgcggttttcgtgaagcaccccttcttcttctaaatactcgagaatatctcttgcatcattttctccgaatgtttcatcggctctgaaaggcagctcatacgcggcgcatttcaggtgatcgaccagtataatgagattatcgggattaatccttgcagattcaggcgagcgtttaaagaaataatcaggatggcgcacaatatattggtcaatcggatcagagtttgccaccatcacgataagcgcctctccctgccgccgcccggcccggcccgcctgctgccatgcgctcgcgacactgcccgggtaccccgtcatcacgcagacctgaagctggccgatatcaacgccgagctccagcgcgtttgtgctgacaacgccgagaatgcttccgtctcttaacccccgctctatttctcttctttctttcggaagatatccgccgcgatagcctctgacagacttcgacccgatttctttttttacgatctcctgaatgtggcttaaaataatttcaacccggacacggcttctggcaaaaacaatcgtctggatcttattttttaaaaaagttttggcaagttcgttcacttccacggtggcgctttttcgaatatgcagcggtttatttacaatcggaggattgtaaaaagcaaagtgctttcttccggccggggcgccgttatcgtcaatcaggcgcactgattttcccgtcagctgctccgccaattccctcggattggcgattgtggcggatgtacagataaatgacggcgtgcttccgtaaaaagcgcagattctcattaaacggcggatgacgttcgccacatggctgccgaatacgccgcggtacgtatgtaattcatcaatgacaatatatttcaggttttcaaacagactcacccattttgtatggtggggaagaatggctgaatgaagcatatcagggtttgtgatcacaatatgcccggcctttctgactttctgcctgatggccggagacgtatctccgtcataggtaaagcttttaatgtccatgcccgtctcgtctatgatttcgttcagctcgcttttttgatcctgcgcgagcgcctttgtcggaaataaataaagcgcgcggcttgaggcatcttccgcgatagactgaagaaccggaagattatagcacagtgtttttccggaggccgtcggtgtgacagccacaatgctttctccgttttgaaccgtctgaaaagcggagtattgatgtgtaaagagccgctcgatccccctcttttcgagagccgcccgaattttccgatctacttgctccggcatcggcatggttttcgcctcccgcggttcctcttcatgccaatgcacaatattttcatgattttttaattcctgaatcagttcgctcaatgattttttcttcatcgttcacacctctttatgaggtacagtttaccgaatatttgtttgcctggctagatgaaaatcctgcacaagaaaaaaagcagggaatcagcccctgcctacttcatttttatcgtaaaaagctctgtttgtccttttttcgcttcatttgcgcctgcaaattgcaaaggttctgcggcatcgccattcataatcaccatagggatgacggtgctgcttgctttttcttttattaaatccagccggcatgttaaaagcagatcgcctgttttcactttgtctccttcttttacatgcgcttcaaagccttcaccgttcatattgacggtatccaaaccgacatgtatcaaaagttccgctccggaaagggtgcggatgccgacagcatgttttgtatggaacagctgaatcacttctccctcaaccggtgaaacaatgtctccgtttgcaggctcgacggcgatcccgtcccccatcattttttgtgaaaatacgggatccggcactgaagccaaatccatcaccgctccgtcagccggagaaaagatcacttcctcggccggctttttccggctgtctcccaatccgaataattttttcagcaatgtgttgtgctccccttcctaaatgtgaatccgttaccagtttattctccactatttaaccatactttcttttttccttcaattcttaaccatacggcataacatcgcatagtctgtttgtaaaaaggcggtggtcatatggatcaatcacaaaacgataaacttgatccgcaaagaaatgaggacatcatcagccatgcgatggaccaattttttcactcaggtcccttcgcagaattgatgcagggttttcagcaccttgtcaattcggcttttactgaagcgcaagtgacgattgacgtcagagaagagccgacgggcctcgcggttgatatcggcgttcccgagacgttccgtgacggtgatatgctggtggaaacgaaggggtgctaccttcacgttacaatccgctacgatcataaacaggctcattcatcccatgtgtcttcaagcatgacaagaaccgttgtcctcccgtataaggtgagtgaagaagatatggaaacatcctggaatgaacagacgcttaccctctttttccctaaaaaataagcatgaatgatggatatcattcatgctttttatttgaagatactggtgaagcctttcaccagcgatccgacctgatttacggcgcttaccatctgccccgttgtatctatcattttattaaagtcaaactgtccgttcgtttttttaaactgggagagtatgcctgagaattgggaagactgctgctgattcggtctgggaacggggtaaggattcacaaaccccggctgccccccgggcatggctgcctgaggaggagagggagcaaacggctgctgcacatgaccgtattcctgattcggataaaattgctgcgggtactgcccttgctgatgatatggcggctgctgcaatggctgtatctgctgcggatacggctgctgtaatggctgtatctgctgcgggtagaaatatcccgccggctgctggtacatattttgatatggctctgctctccattgcatatgacattcccccttgtctctcactaagtttctgctatatatgtatgaattccgccgtggttatgtgctttcggtgattctgatttttgtcaaatgctgtcgaaagtcttaattttttaaaaacagaaaaaagtcgaatcgttatgttaccataatctcaacatacatgagaggggatgcaccattatgaacgtatcatacttaagaaagcgttttgctgaagtgaaaaaatatgaaacagattgtgcagataaactgatggactttgcaaaattcctctatattcaaggccatctcaccgcaaccgaatttcgaaacagtatgaaggttctcgaagcaagtggagcagaaaacccggcgtatgaataacatacccgacccctttatataaaagaaggcagccgttttcagctgccttctttttcaatttcatcccttaatatacgaagcgtatataaaacagattcagttaaatccctgtatctttttttatgaatatgatgaacatatgattggagcatcagctctccgaaattttctgtaacggcctgaatttgtgcgtgatgaacgtatttcggacggttttcctgaataaacgcaagcgctgcttctgtccaaagcgcgcaaagccggtctcttttttcaacatcgggtttaataatctcaaaaaaatcatatgaacggcctgactcttttccatcctgataccttttttcggcttccagaaccgcctctatcatttgttctgtcagctccaataacgactgtgtctgcaaacggactcacctcagtacatatggtaccaaagtttttgcataaaatcagctgatccggcaggctctcggcaaatcctttttacgccggtcagtcaaaaacaggtcatcaatacaaacatgaagctcccgcgcctcttcctcaaggcgggaaagtttctcctgtctgatttcttcagcttccgcctgacaggatctgactgcttgggtaagcgtcttttcagcagcagaaatccggatttcaatatcagaaagcagacggagaatatcagccttgctcgtgtaaacagacattcatgttcctcccttttatcacttgcgtctctttagaatataattctcgttttcataccgctctcctctgcacatgacaaaactagaagcagttcggcaaacaaacagagattatcctaaaaggcgtgcctttcgacaaaaaagtgccgcaaactttgtatgaaccggcacgttaatgcaaacgatacagttgaggaggtgccgtatgaaaacgagaccgaaaaatgcaggtaaacagcaaaaaaccgaagcaaaaacgactgatacgcttgataaaaaattaggcggcccaaaccgcccttccacgtaacacatcagcagcccgaaaccccagcgaacggtggtttcgggctttttcatttcttcagccactctttaaccgcgaagagcgcatggagctcccgtcttttctggaagtaccagtccgtcagttcaagctgtttcggcattttctcctgtaagaaagccccttttcttaaccttttttgaaaccaatccgccctttcgccgtctaatggatgggcaacaatgggataggttgtcctcagcatcggtgatgttctttttttgatgccgatcattttctccatatcaaagcgtgaaccggtatgaggaacggtatcaagaaaacggtaaaaagaagcgtgaagatcagggctgaacagtaggcgggccagctgttttccgagcgtaattctctcttcggtttttgaaaaccgtttgacggaaattccgtataaatgtccgtcaaatgaagggaatatcaccgtattaaagtgaaaccaatcacttaaataaaaaggaatcgtgccaaaaacattctttttaaacgaaggattttgtataataggtgcttggatagtgttttgttcatttataataagagcatacatgagccgttccgtatctctgtcacgccaaaagcggaaccattcttcctgcataaaagccgagacgcggaaataaggaagatgacggaaaagaggttcgccgatttgttttgaccactggtagaccagaagctgaggataggcatcagaaaaaatcagccaattcgccctttcatacgaaaggaaaaaccagtttttctgactgctgtcaaggccctcctgataaaggacgcctcttaaatcagtcatcgaccagcccgcattgcgggacacaaacgatgccaaaagcggccacttgatctcaggatggcggtcataatatgctttataggcattcgtccgggaaatattatcggcattttttattttcgtctctttttcgatcaggcgaagaatggcggttacggtctgtcgtttatgcacgttcattcacttccgtcactattagtttgataaggaggatggaaaaagtgattcggtacccgaatggaaaaacttttcagccgaacaaaacggtttcatcccaaaacagccagaaacggtctcattcatacagtaatcgcggcatgaccctcgaagacgacctgaatgaaacgaataagtattatctggctaaccaaattgctgtcattcacaaaaagccgacacccgtccagattgtaaacgtccactatccgaaaagaagcgccgcagtcattaaggaagcttattttaaacagtcttccacaactgactacaacggcatttataaagggcgctacattgattttgaggcaaaagaaacaaaaaacaaaacggcatttcccctgcagaattttcatgatcatcaaattgagcatatgaagcaggtggtcagacaagacggcatttgttttgttattatatccgctttcggaaaggtttatttcctcgaagccgacaagctgtttgtcttttgggagagaaaggagaacaatggcagaaaatcaattcgcaaagacgaattagaagatgcttcctttccgatttcccttggatactcaccgagaattgattatattagtattattgaacagctttatttttcgcaggaacagtagactgagcgaaaggttgataaacgaaaggttgagatgttatgtcagatcaatttacgagccgtgaagaacgccgtaaggcaaggcagacgaaaagcactaagccctcttcaccgaaaaaaggcaagaaacagcgtaaaggcggtttattcaaaaagattgtgctgtccttggttattctgtttgtccttggcatagtcggcggagcggcggcatttgccgttttggtttccggcgcgccgtctttggacgaagccaagctgaaaacgccttactcttcaacgatttacgataaaaacggcaaagaaatcgcggaagtgggcggtgaaaaacgaacctacgtcccgattaaggatatacccgatgttgtgaaagaagcatttatcgcaactgaagacgcccgtttttataagcaccacggtatagacccgatccggatcggaggcgccttggtcgccaactttacggatggattcggttcagagggaggaagcacaatcacccagcaggttgtgaaaaactcgcttttgacccatcagaaaacgattaaacggaaagcacaggaagtgtggctttcactgcagctggagcgccattattctaaagatgaaatcttagaaatgtatttaaacagaatttatttctcaccgcgtgcctatggcgtcggtaaagcggctgaagaattcttcggcgtaaaagatttgagcaagcttacggttgaacaggcggcgacgcttgccggaatgccgcaaagcccgaccggatataacccggttaaaaatccgaaggcttccgaaaaacgccgaaacattgttctcagcttaatggaaaaacaaggattcatttcaaattctgactaccaaaaagcaaagaaagtgtccatgaaagatgaaggcgtcgtcagccaaaaggaatacgataaaaaggacacaaataaatacagcgcttttgttgaagaagttatgaaagaaattgagacaaaagaaaagaaagacgtcgatatttcaactgacggattgaaaatttacacgactcttgatacgaaagcacaagattatcttgatcaattgatgaacggagatacagccggcttttcggaaggcatgcagggcggcgtcactctccttgatacgacaaacggagaaatccgcgctatcggagcaggacggaacagaactaccgggggattcaattatgcaacacaaggtaaaacccagcctggttcaacgataaaaccaattcttgattacgggccggtcattgaaaataaaaaatggtcgacgtatgagcagattgatgattcggcttatacgtactctgacggcacaccgattcatgattgggacaataaatacagaggtcagatatctatgcgagaggccctcgcagactcacgtaatattcctgctttaaaagcataccaagcagcaggaaaagataatgccgtcgacttcgcaaacgacttaggattgggattaaacaaagatcaagtatatgaaccctactctatcgggggatttggtgagggtaaccgcggtgtatctactatgaccatggcaggcgcctacagtgcgttcggaaataacggaacgtacaacgaaccgcacgcggtcacatcgattgaatttaatgacggcactaagcttgatttaacaccgaaaccgaaaagtgctatgagcgactacacagcgtttatgattaccgatatgctcaaatcagctgtcgaatcaggaacaggtaaactggctcaggtgccgaacgtggaagtcgccggtaaaacgggtacgaccaactttactaaagaggacattcaaaaatataacattgctccgggcggagtcccagactcatggtttgtcggatacacccctcaatatacagcggcggtttggaccggagttgagtctggcaacaaagcaggcaagaaatcactgtcttctgctgaccagcaagtcgcaaaacggattttccaaaagctgatctcatacgttgatgacggtaaaggaagcttcaagcagcctgacagcgtcgtcaaagaaacagttgagaaaggctcgaatcctgccgctttagccggaccgaatacgccggatgataaaaaagtgacggagtacttcgtgaaaggaacgcagccaactgccgtttctaaaacgtacacgaaagaaaaagccgataaaccgacaggattgcaagtgaaatacgacaaagataaaaaatcattaactttaagctggaattatgacggtgatgcaacattcaatgtcaaacaatccgttgacggcggaagctacagtgacattcaaaacagttcagcaaaagaagccgtcgtctcagatgtcacaccaggctccacatacagcttccaggtgacagcggaaaacgatgacggaaaaagcgatacggcatcagcatctttcaaagtcccgaaagatgaagaagacgatgcggataaagataaagcgactgacgatgaacagaagtctgatgaagataaagacaaagacaagacgcaaaccgatgattcaaacacagatgacaatcaaacagatacgtctgacggatcggatcaaacaccaactgatgacccggataaaaatcaggatcaatccgataaggatcaaacagataacaacaatcaaaatcagcccggtaacgggaccgataacaacggacagcaagataacagctctgataatgattccgattccggttcagacggctcaaataaacccgacagcggtcaaacggacaaaaacaaagactcatcttcaaatatcaacgggcagtccaattcgtcaaccatccagtcaaattccgctcattagcggacgaaatccttcacctcaaacaggtgaaggatttttttcatacaaaaaaacctccttatgagaaaaggaggtttttaacctttgttcatggcttcatatttatgatattgtttcttcatctccgtcatcaattcatccagctgaataaacgagtgaaattgagtcggtttcgttaaaataaacgccattcgctccgcccaattgatcggttcggcgggaaaatgctttgtttcaagcacagtccagtcgagtgatgtaacccgctcccctgccgtccagtgaaaagcggcaatcagacaggcaattcccttcagcatgtcattttgatcacatctcgattttcttgtttgaaaaacgggaagcagcgtttctttcgtttcattccaaatctgaaacagaaacgggacatattcgcccctttccctccatggctgcacggttggctgaccgctgaaatccatatacagcggatggcggcgcagcgccgttttgatctcgaggctttccaagtccgtaaggctgcgcaggtatgtttcatagcctgccagaatgtcaatcgccgtcaccgtttcaccagcccttttttgtcacgcttctgcccttctctgcatagcggaagcaaaggacattccgcacagcggggagattgcgctttacaatgatacctgccgaaaaatattaatctgtgatgcgtaacagaccaatcctctttcggcacttttttcattaatgttttctctacttccaaaacagagtccttccagcggcagataccgagccgtttagagacccgctccacatgagtgtctactgcgatcgcaggtacgccgaaagcaacagacacgaccacatttgccgttttccgtccgacacccggcagattcacaagctcatcccggtctttcggcacttctccgccgtactcttcgatgatcattttgctcagcttttgaatatttttggctttattacggtacaggccgattgatttaatatcttgctggagttcttccagcgatacggcaagataatcttcgggccgtttatatttttgaaatagcgtttttgtcactctgttgacgagagcatccgtacattgcgcggataatgcgactgccacaaccaattcgaaaggatttgaatggacaagttcacattctgcgtgcggaaacatatcgccgattttttcaagacaatattcaatttgctttaaatttaacacgtttctccccttctcatgttattgttccagccaattgtaaaaaggcacctgcctcgtatactctttttgcggatcattttgttttgtttgaacacgccggaatttttggctgtgcgcctttgcctgctcaaccgttttgaagccgttctttttccattcaaataaaatccggtcaatatagcgaaaactgagtttccccgataaaacggcttcttttaaggcgtgtttaatcagaatcgcatcatgctgatcctggtcctgccatatggccagcgtctcgcattcaagcggcgacagcggtcttccaaactcttcttcaaagatggtatacaggcttttttgttctctttctgacgttctttcctgcgtttcgttttgtgaatgctgcatgtaatcatacagcttcgcccataacggctgcagagaatatttttcaaactttatgccgttatggtcttcacattcttcaataaacagaaaacctttttgaataaacattctcaggcagcttgtacattcttcagcagagatggacatgcctgactgaagttcaaacggcgtcggaaaataagagcccttttccaaatgcattttaatcttcaaaagcaggatcaattcggtttcattcagcccgagctgccggtaatgtgtcagcagcaggttgggaatgcttgaaatgccgagttcctgcatatctataaattgctgttttttcatccttacacctcttactgtaaaaggttatctccgggagctttcccctttacttagaaaaagtctcccttgcaggagacttcgttttttaaaactattacggatacagacggttcagaagtctcgggaacggaatcgtttcacgcacgtgaggcgctccgctgatccaagccactgtccgctcaagtccgaggccgaagccggagtgcggaacagaaccgtattgtctgagttcagcataccatttgtaagcatctgaatccagaccgtgttcttttaatctttcttccaataaatccatatcatgaacgcgttctgaaccgccgatgatttccccgtagccttccggagcgattaagtcggcacataacacgacatcgtcacgatctttggcaggctgcatataaaacggttttaatgacgtcgggtaatgagtgataaacaccggtttgtcatagctttctgcgatcgctgtttcatgcggcgcaccgaagtcatctccccactcaatatcgtcaaagcctttttctttcaggaattcgatcgctttatcgtacgtaatgcgcgggaatggcgctttgatttgttcaagcttcgatgtgtctctacctaatgtgttcagctcgatcttacaatgttccagcacactttgtacgatgtatgcaacataattctcctgaacttcaaggttttcttgaaattcaacaaatgccatttcaggctcaatcatccagaattcgatgagatggcgtttcgttttcgatttttccgctctgaacgtcggtccgaaagagaatacttttccgagcgccattgcagctgcttccatatacagctggccgctttgagacaagaaggcgtcttcatcaaaatatttcgtcgcgaacagctcagtcgtgccttccggagcgcttcccgtcaaaatcggcggatcaactttcacgaagccttctttgttgaaaaattcataagtcgcacggatgatttcgttgcggattttcataattgcgtgctggcgtttcgaacggagccataaatgtctgtgatccattaaaaattccgtaccgtgctctttaggcgtaatcggataatcagtcgcttcgtgaatgacttcaatggatgtaacagcaagctcatagccaagcggtgaacgctcgtcctctttcacaattccttttacataaagtgacgtttcctgcgtcactgattttgcgatttggaagatgtcttcttctacttcagctttgacgacaactccctgaatgaagccggtaccgtctctcagctgtaaaaatgcgattttaccgcttgagcgtttattagcgacccaagctccaatcgttacttcctcgcctgtgtgtttatacacttggttgattgttgttttcaaactctttccctccagaacaagaaagacattcaggaatctgcctgaatctcttttttcatcactttattatacccgttctactctaacggggtcaatgcaagtgaaaagcggctttaaaagccgctttttcagaatcagctgtgtttttccgtgaagcggcggattctttcgaccgcttcttctaaaagatcgagtgacgttgcgtaagataagcggacgttgtccggtgaaccgaaacccgagcccggcacgatggcgactttttcttcttccagaagcgccttgacgtattcatcgacatctttgaatccacagttttctgcggccgctttggcgttagggaacaagtaaaacgccccttcaggtttgacacaggtgaatccgggaatctcactgagctgagcgtaaatggtgttcagtctgtgctcaaatgcctgtctcatctcttccagcggctcagccggaccgttataggccgcaatagcgccgtattgagcgatagacgtcggatttgatgtgctgtggctcgcaaggctcgtcatcgctttaataatcgtctccgaacccgccgcatagccgatcctccagcccgtcatgctgtgagatttcgacacgccgttaatgatgatcgtctgctctttcaattcatctgaaagctgtgcgattgagacgtgtttttttcctccgtatgtaagcttctcataaatctcgtcggaaacgatcagaatgccatgctccagacacacttttccgagttccgcaagctcttctttcgtatacataacacctgtcgggttgctcggtgaattgataatgagcgcttttgttttctcggtgatagcctgcttcagctgctccggtgaaattttaaactgattggattccagcccttctgcatagacgggacgcccccctgccagtttcacctgctcagggtagctgacccagtaaggagtcggtataatcacttcgtccccttcatcaagaataacctgaaataatgtatacagagcgtgtttcgctccggtgcagacaatgatttctgacggcttatattcaatcccctggtcgtttttgaatttttttgcgatactgtctttcagcgccggcagaccgcctgaaggcgtatatttcgtatggccttcattcatggaacgcaccgcggcatctataatgtgctgaggcgtattaaaatccggttctcctgctccgaggccgatgacatcatggccttctgctttcagctctttcgcttttgcagtaattgcaagtgttgcagacggtgttaatgcggatactctttttgccaatttcaacttgaactccccctaatacgtctcacggtgtgatgtttttgagaatcttgccgcttgtaaagtccacataactaaagctatactgcccgcttttgttgatataggtcacttcccataacggaacattgttttctctcgccgggtgaacgccattcagcttggaaacaagcccttcgtcccggacgatcttggcagccttgccgcttgaaatgccgtcactggctttttttgagagaatttttgcttttttgtcggccggaacccatacatacatatcttttccatgtttatccgttccggtaacaacataatatttctgtttgccgacaaaggtctccactttctcagcatctgtcaaatccgttttttctttagcggctgcggcagctgtttcgtggccttcttctttttgggccattgcagatttaaaaatgctggccgaaaataaaagaactgctaaaaaaataataccaaatacggctgtaaatattaatgctttttttctcatctttttcacctatgtgcgataaatggtgaagaccgcttcattttgattttcttcgtcgagcgcaagcccgaacatcagattgtcccgtttcaaagtccggtttaatgtatcgacgattttatataaatcatctgaatgctccacattaatcgttgacagaatttcaattttgctttccatttttataccctccatcggtcgaacaaattttgttagtcataacgggatgcgcccgcggcataataaaatcacaaggcggcatgaacccgcttttactataaaaacaattcctcatcccacaccacgaaagccgcgattatgcggcttttattccgtttggctgacataagccccgagttcggcatccgtcagctccaaaagggatgaagtcgggagcgcttcaagaaacagccgtccgtatcccgccgtctttacacgctgatctaaaagaacgattgttcccttgtctcccgccgtacggagaaggcgcccgaccccctgtctgaacgttaacacggcctcaggcagggaaatcgtctgaaacggatttttcccctgcttcttggcaaattcgcattttgcggcatgaagcggattgtcaggcgccctgaaaggaagtcttgcgatcatgacggttgacaattcatcccccggaaaatcaacgccttcccagaaatgatttgtcccgagtaaaatcgcccggcttgccgttttaaaggttttcattaatttaccgggactcccgcccgaaataccttgggcgagaagctgaatgcctgatatctccatactgagtttcagttcctgatacacttttttcagcatatcatgagacgtaaacaggacaaggatcttcggctgttttccctttgacatgatttctgcatacttggcaatatgctcaatgacttcccgctctccgtcatatttaacggatttcatctctttcggaatgatgacgttcatctgatcatcgtaagaaaaaggagacgggatgcttttggtgcgcggataaaaatccgcaagtccgagcctttcaatcataaattgaaaagaatgctccaccattaaggtcgctgatgtgagcacaacgctttttttgcgggcgaaaaactggtctgccagcatttcaccgggctccaaaggctgcgcatagatgctgacggcattttttgcgcccttcgcgtcaatttcaacccaaacggcttctttctcatcattttcaaacagcagcctgctgaacgtatcgcgatattctttcagccccctgatacactttacatattcggccgctaaaaaagccgctccgcttttcatctgatcaagcttttgatgtaacagtttctcttgtactgaaaacatgtcaagcagctgatccagcatcgcacaaagccgctccgctccgtccgttatcatgtgaaaccctttatcctggcttttatgattgagactatagacgagacggttcgaatcgtctttaggttttcttcgtttgacaaaagaatgcactgaactgaaaaatgcgtcgctttccgattgaatatgcttcatccactcatcggcgtcaaaaaaactttccgccggcagttcatacgtataaaacagttttctcatccgctttaacagtccgtgttcctttaaggttccgattcggctgagctttgtgtgcagtccgatgtatgaagctctcttccccaggtgctcgctggcagcgcgttcgaaatgatgcgcttcatcaatgatgaccgttccgctagcaggcagttttttcgtttcactgctttgatctgaaaacagcaaagcatggtttgtgataatcagatctgcggcctgcgccttttctttagcccgttcataaaacccggcagccgagtccttcccttttttaaaaaaagaattctcatcgtaagccatgcgctcccacagcaatctgccgcctgatggaagattcagctcagcggcgtcgcccgtttcagtctccgtcagccagacgagaagctgcgctttcgtcaaaaccgcatcatagttgtcatcttcctcatgcagaatatgttcaaacttaggcaggcacagataatgtgatttcccttttaaaatagcggctttgaccggccaaggaaacatacgctccaaaagcggaagatctttagacatgatctgctgctgcagaagagtagagtacgtgctgataatcacgggagtttgctccgctttggcaaataaaacagccggaacgagataaccgatcgtttttccgatgccgggtgccgcttcaatcagcgcatgctcccgattgcggaaggcgcctagcacttcatccatcatcgaaagctgccctttccgcttttcatagcgggggatgatatcggataagatctgttctttttcttcgttccacttttcaaggtcaatggccgcattcaccggacgggaaaccggaatgtgatcgggctctttaattgaaaaagaggcgtatggaatgcagctcttttcttccgccggcctgctttcatgtataaaagaatccaaaagcagcgtcaaatcgctgataaaatgctgtgaaagccttctaagctgctttaatgtcggtaaaggcaaatgtttcagtttatgtaaaatgtctaaaaagaccagtcccgtaacctccgcatcgctgtctgcgcggtgaggtcggtcatgaacaatattcagctccgcgcacaactcaccgagcttatatccttcaaaccccgggaaaacaatacgtgaaagctcaaccgtatcaagcacttcacaatccggcagctcatagcccgcttcgctcagttcatgccggacaaatccgaggtcgaaatgaatattgtgggcaacaaaatacgcgccgtcaagcagatgaaaaatctcctccgcgaccgcttcaaacggcagttcattttcaaccattccggacgaaattccggtcagctgttcaataaacggcgggatggcctgattcggattgatatattttgaaaaccgctcagttatttgtccattttcaatgacaaccgctgcgatttgaatgattttatcgccctttttcggcgaatttcctgttgtttcgacatctatgacaacgaaccgttgtttgttcattaaaatggacacctcaattcttgcatacgagaaaagtgtaacacgttttgttgagaaatggagcggaaaaacagcttttgcccctaaatcttaaaagaaaacccccatgaagggggctcttttacaaaatcgtgtgtgccggctcctgacccagcatctgctcgattttattctgatcatccagaacggccaccttcggctgatggctttttacttcctgatcagacatcatttgataagaaataataatgactttatctccttcttggacgagacgggcggctgctccgtttaaacagatgacgccgctcccccgcttaccgggaataatatacgtttcaagtctcgctccgttattattattcacaatctgaactttttcattagcgagcattccgactgcatctaaaagatcttcatcaatcgtaatgctgccgacatagtttaaattggcttccgtcacggtagcgcggtgcagttttcctgccatcatagtgcggtacatattatgatctctcccattcatcaatatcaataatgatattatcaatcagtctggctttagaaaattggacggcacaggccagaatgaccttgccgtttaatgttttaagcggagtcagctccggataagcgtacagttcggcataatcaatgacgccgcttgtgttttcgatgatatcggtgacggtttttataacggtttccggatttctttcaccgtctctgatccgttcggcaccttgctgcaatgctttatagatcatcggcgcttctttgcgttcctgctcagtcagatagacgttgcgagagcttttggcaagtccgtcttcttctctgaccgtgtccactgcaaccaattcgatatccataaagaaatcctcaatcaatccgtccacaaccgctgcctgctgggcatctttcaggccgaagtaggcgcgggtcggtttaacgagattgaaaaacttcgtcagcacagtggccactccgtcaaaatggccgacgcgggaggcgccgcacaacacgtcagttctccttttcacttgcacggcaacattttgctcgcctttgtacatatcacttggagacggcgtaaacaaaacatctgcccccgcctgttctgcaagccgggcatcgcgctttaaatctcgcggatatgcttcgtaatcctcgcccggtccgaattgagtcggattgacaaagatgctcatcacgacaatatcgttttctttgcttgctttttcaaccagcgtcagatgtccttcatgaagaaaacccattgtcgggacgaatccgatcgtccggccttctgagcggtattgtgcaatcaattctttcagctgttgagtttctgtcagttgtttcatcgcttactttcctccgtacaagccttgcagcacagtttggtttatctgaaaggaatgcttttcttccgggaaaacccgttctttcacatcacggacataacagctgagggccgactcaatcgtgccgtcgattttggcgtattgcttcacgaacttcggtgttctgtccacgccgtggccgacgacgtcatgatagacaaggacttggccgtccgcttttgaaccggctccgattccgatgacgggaatggatacttcttcttttattttagcagtcagttcagcaggcacgcattcaagcacgagcatcatcgctcccgcctgctcgcatttgatgctgtcttcaatgagctttttcgcgctttgctcatcttttccctgtactttatatccgcctaatacgccgacagactgcggtgtgaggcctaaatggctgacgacgggaattccgccgagagtcagcgcgcggatggattcgaaaacgccgtctccgccttccagctttaacgcgtccgcgccgctttcctgaataatggccgcggcgtttttcaatgtatcctcttttgaaaggtggtaagacataaacggcatgtcagttacgataaacgtatttttcgcaccgcgttttaccgcttttgtatggtgaatcatgtcactgaccgttacgccgactgttgaatcgagtccgagcacgaccattccgagcgaatccccgactaaaatcatgtcgactcccgcctgttccgcaagctttgcctgcggataatcgtaagcggtcagcatcacgatcggctctccgttttccttcattttcataaaatccagttttgttttcattctgtttctcctcctctaaacggtgaggagatgagccgccaattcttcgcaagcaaaaaagccttctgtaaaataagaaggattcccacttgtttaacgttcggcgaatgtcatccctctgtcccagtccttttttggatcaaggcagacttttcgtaatctctgttctgctgatcgggtgcagttcattatgatactgcccataggaagtataccaaattcacgaggcttgtaccaactaagattaattgagctcaatatcggcagaatagatcttctttataccatctctcgtttccaagagaagaactccctcatcatcaatgccgagcgatttcccgtaaaacgtcccttgcagcgttctcgctctgagctcgttccccagtccgaccgcatagctttcccatagcagcttgatcggtgtaaagccgtggttcaagtaatcctgatagcgtttttcaaaagtcagcagaatctcttgtatcagacccgctctgtcaattttttcgccggcttccatgctcaggctcgtcgcaatgtcctgaagctcgccgggaaaatcggtttcctgctggttcacgttgatcccgatcccgagaataaccgaacggacacggtcttcttctgcctgcagctcagttaaaatcccgacggcttttttgccgtgaatcattaaatcattcggccatttaatggcgggctgtacacctgtaaaagcctcgatggcctgtacgatcgcaacggcagataacagggtgagctgcggcgttttttgcaaaggaacgtcgggtctcagaatgaggctcatccaaatcccgtttccctcctgtgaatgccatactctggccattcttcctctgcctgccgtttgtttatcggcgactacgagcgtcccttccggcgcgccgtcattggcaagttcatgagcggttttttgggtggacggcaggacgtcccggtaatgaagctgtttgcccaaaacctctgttttcagcccgaaacggatttcggattcactgagtttccccggttttttaatgagcctgtacccttttcgtctgaccgcctcaacctcatagccctctttgcggagttcctctatatgtttccaaacggcggttctcgagcagccgagcgcgtcacttattttctgcccggagataaagccgtcacccgcctcagaaaacaaatcaattaatcgggttcttaatgttgatcccatgatgcgagccactcctttatgtcatgttttcggttagggagcttccctgccaataccgcttcttcgatccggcgaagttcttcggccacccatttacccgcgcggcggtttctgagctccatcagatcagcacctgaaatgtcgaggtctcgaaggcttttgatcggcagctgctcatacaggctctgaacctctttcagcttttgttcatcaatcgtcttatgctttttcagcatcccgattttaacggctgaaaacagcgcctctcccgcccggtacatcgcttccgcttccagctgcgccggataaacgcttatgatctgcaccgctttttttatgacttttcccggcagtttccattgttttaaaaacgcctcggcgcttttcggacaaagaccgagaaacaataacagcgctgcccagcgttcttcgcgtgcatctaaagaagaaaacggaaatccgcttgcttccagcatttgctgctcataaccggaaaggccgggcagctcttgtatcagacctgtctgcaccatcgtttgaattgcttcctgtgagaaagcgccctgcagcagcttttcaaactcgacggtctttcgttctactgatacatgtgccaaaagctccctgtcttttatgacggcctctcttgtttctttttctaacagaaagccgagctgactcataaagcggacggctctcatcatccgcagagcgtcttcccgaaaacggtcttcaggattacccaccgtacggatcagcttttgtccgatatcatgtgcgcctccgaaataatcaagcagctctccttcggcagacatcgccatcgcgttaatcgttaagtctctccgctttaagtcttctgataaagaagtaatgaaccgcacagcttcagggcgccggtagtccttatattctgattcggcacgaaaagtggtgacttcataggtttcatcttcccacaggacgatgacggtgccgtgctcttttcctacatcgacagtccgcttaaagagacgctccacctcattcggcgaagcgctggttgcgatgtccacatcacctatttttcgtttcatatagctgtctctgacggctcccccgacaaagtacgcctgatggcccgccttcatcaggtgatgaaggatggggagggctttgacaaattcctgttccataagatcactccggtcctgccaattcgtcataaatccgttcatactgactgacgattctttgcgaagaaaaggcggtctccaccattttcagcgcatgatcagtcaatcgtttgctgagctgtttatcttctaaaacggcaagcgctttttcagatgccgcctgaatatcgccgacttccaccagaaaaccgcttacttgatctttaatcacttccggtattccgccgatatttgttccgatgcacggcacgccgcaggccatcgcctccagaagtacgagtccgaaactttctttttcagacagaagaagcttaagatcgctgatggaatacagctcttccaccctgtcctgatttccgaggagcagcacttgatcctgcagaccgtatttttcgactagctgccaagcgacgcacttttccggcccgtcgccgacaagcaggagcttcgcctttgtgttggctgcgatattacggaaaacgcggatgacatctttaacacgttttacctttctgaagttcgagacatggatgacgactttttcatccggcaaaatgccatgtttctcttttatactctctgtatttttcttaagataaacacgttcatcaataaagttgtagatggtctcaatttttttatccggcttgattaagtcatatgtttctccggcaagcgcggttgataccgccgtcactctgtcggacgcttcgatggcaaaacggattaaatcttttaatgacggatcgtatcctaaaacggtgatgtccgtaccgtgaagcgtcgtcacgatgccgatgtcacgcttgagcatctgtttggcgagataagcgcataccgcatgcggcagcgcataatgcgcgtgaatgatgtcaagattttccctcgcggcaacctcggcaattttactcgccagcgcaaggtcataaggcggatatttaaataccgcgtattggttgacttccacctcatgaaaatgaatattcggatgatatgtatttaatctgaacgggatgcttgatgtgatgaaatgaacctggtgccctttttccgcaagcagcttgccgagttccgtcgcaataatacccgagcctccgacactcgggtagcatgtaatccctatttttaatggtctcattgtccgcccccaaaaacatcatcattcaaaacgggaagctgttttgaaaagaagccttcggcataccccgtcccggcttctttgccatacagtttttcccgcgcttccaccatttcgatataaccgttggtcagcggtgtgttcactgactgcgccgtaggaataaactggctttgataggcgtgcaggctttcttttttcagatcgatggtttccgttatgtcgattacaaagtccggacggtgaaacccgttgatcatataatagtatacgcgctgagccttatgagccggcagttcctggtgatctctgtatttatgaattcccgccgagaacaccgcttcttcgaccaaagccgccgcattgccgtggtcaggatggcggtctttcggataaggcatgaaaacggttttcggccggcaggctctgatgacactgacaatccggcggatgccgtcctcacttttcaaaagcccgcggtcgggaagcgtaagctggattctctcttttacgccgagaattcgggccgcctttgccgcttcttcttttcttatccctaccgttccgttggatgatagttcggcctcggtcaaatcgcatatcaccgcggtttttccttgagccgtaaattttgcgatcgtgccgcccataccgatctcgacatcatcactatgggcgccgaacgccagaatatcaacgtgttcagacattcggctctcctccgcgcacaagattgcggaaatcaaatgccccgccgtccagcgtccggacgaggatttccgctgtccccatatttgtggcgagcgggatcgcgtatacgtcacacagccggatcagcgccgagacatccggttcatgaggctgcgcagttaacggatcgcgcagaaaaatgacgagatccagggcatttgccgcaatcaatgcgccgatttgctgatccccgccgagcgggccggattgaaaacgttcaacagacaatccggtcgcttcctggattttcaggcctgtcgtacctgtcgcgtataactcatgatggctcagtatatctttatatgcggtcgtaaactgaaccatatcctgcttttttttatcgtgagcaatcaaagcgattttcatttgatgttctcccccttgccgattcagtcgataatattttcgagtccgtatacaagctggtcgattttcatcacttgctccactgacagcttcactcctgacataaaggaagcccggttataggagtcatggcgcagtttcagcgtctggccgtccatgccgaacatgacttcctggtgggcgataaggcccggcagacgcacgctgtgaaggcggatgccgtttaattcagcaccgcgggcgcccggcagaatttctttttcatcaggatggccctgctgcttttctgtacggacgcttgagatcatttccgctgttttcagcgccgttccgctcggggcatccagcttttgatcatgatgaagttcaatgatttctacatcttcaaaatagttggcggccatttgtgagaacttcatcatcagcaccgcgcccaatgcaaagttcggagcgatgatggcgccgattcctttttcttcagtcaaggcttgaagctcctctaaatccgcttcagaaaatccggtcgttcccacaacggggcggacgccgtgttcaagagcggctttcgtatgttttttgccgatttcaggcgttgtcaaatcgatcagcacatccggttttgtttcttggaaacatgcgcggatatccgtataaataagagcgtctgaatcagctgacatcacttcccgcaatgtttgctgatcgtatgtatggtcaatagcgccgacaagctcaaaatgaggcgtgcggacggcaagttttacggcctcctggcccattctgcctctcggtcctgcaatgacgactttaatggtttcatttgacatggtttctcctactttccttcttcttttctagtccagcggtctttatcacgtgtattaaatttatgcatgacgcggttatgagcttccaccaatgaaatatcaagggagttggcgaggcagatcaggacgaacagcacatcgcccatttcctcttccatgcttttctcattttccgtcgttttcttcggcttttccccataataatggttgacttctcttgcaagttcgcccagttcttccgtgagacgggccatcatggcaagcgggctgaaatagccttctttgaattggccgatatattcatcgacctcagcttgtaagtctttcatcgttttgtcactcactgtgcgaatacctcctgtcatctcttccatgttagctaattcaagtacatttgacaaatgttaaaaacggcagtttgctgttttcttttgtatccactataatatttacgcaatcttatggaaggaaaaggggtttgatgcaatgcttggagaaatcagaatcaaaaacatttgctttattttaatcggcgccgctgttttttcattcggactggttcactttaatatgcagaacaatttggcggaaggcggatttaccggcattacgctgcttttatatgcgttattccacatcagcccttctatttccaacctggtattgaacattcctatctttttcatcggctggcgtatgctcggccggacgatgtttgtctataccctgatcggcaccgtctctctttccgtttttctgagtgtttttcagcgctacgaaattcatatgccgctgtcgcatgatttagcgctggccgccttattcgccggtgtatttatcggcgcgggtctcggcattatttttaaatacggcggcacgacgggcggggtcgatatcatcgccaggctgatcaacaaatttttcggaatcccgatgggccggacgatgtttgcctttgacgcctgtgtcattttgctttctttgtttacgtatctttcttacaaggaagcgatgtacacgcttgtagccgtttttgtcgctgcgagattgattgattttatccaggaaggcggctatgccgcaaaaggggcaacgattatttcttcgaaaaacgatttgatccagcaaaaaatcattgaagagatggagcgcggcgtcactgttttaaaaggacagggatcatatacaaaagaagacagggacgttctttactgcgtcgttccgaaaaacgaaattgtgcttttgaaaagcgtcatcacttccgttgacccgcacgcctttgttgcagtaagcgacgttcatgatgtgctcggcgaaggatttacgcttgatgaaaataaaaatccgatcagacgataataaaaaggcggcttttgccgcctttactgtttgtgtttccatttgacaaccggtgattttttcttttttaatcggcgggcgaattccggactgacattgagcgtctgctcgacgaagcgctgcggcgtcagtgccagccattggtttaaagagacatcttcaaaacggtcgcttttgaaaatttccagaaagcgaagcacggtgtcaccggtattctgaacataatgtcccattgcaaaaggaacatatcctacgtcacctgcttgatagttaaatgtccgcgctcttccctccgccgcaaacaccgtcattttcgcttctcctgaaagataatactgccactcgtccgtattcggatgccaatgcaattctctcatgcctccgggttcgacttccacgagagctgcggcaatcgtttttgacaccttaaacgtttttgaatcgacaatctttactcttcccccgctggtaacaaggggctcctgccgggaaagcttgtagctgaacggctccaaaacggtgccttccggggaagaaactgctgccttttcaatcgggggaggcggttccagctggaacatgtaacgctctttcttgtgaatgtaggccaagtcatatccgggaacaccgaagttcgcctccagcacgctgcgcggggtatgggcaaaccagtccgttactgaaaaggtgctgttttctgaaaaagagccgtcatcaaagacgagcaaaaactcactgccctgctctaatccttgaatggaatgaggaatgccggaaggaaaataccacaggtccccttcacttacgttgtcaataaaattccttccattttgatcgaccgcagttaaacggactcctccgttaatcacatatccccattcggcttctttatgccaatgaagctcccgcacagctcccggcttcagcctcatgttcaccgccgcgatgtttttggataccggcagttccctgaccgtcacctctctggaccatccgccgtcttcaagcctcatatgcgtatcagaaaatgagaatttcaagttttgaaccgttcctgcatccgttgaaggcggaacgagcatgtcaggattctgaaagtcacgcgcgaggtttcgcggtccttcgtcagtcgccccttttctgcctctgatcggctgcggaaggtgttttgaagccaattgctggatgagttttttcactgccttagctcctttacagcaatttgtgtttatttagacttaggatactcacgctttttctctttctttttttccgctctgtattttcggtagccgacatatgtcagcgcagtaataatgataccgcctgttgtcagaatgacccagagcagcgaagggtcagcgtcatcccgctccaccttgtcaaaaacccgctttaaatcctgctgcaggagcgtcagacgctcaagctttgttccttttgtcatctgctgaaacccgtcctgctcaatcacctcgatatgtttcgccaccgtatcaagctggccggccgacacatccattgtcaggctgggataaattaaatcatataatgatataaattcattccacttttcattgaaattttcacttccgtttccgctgacatcttcttttaaggcgctgaatgtcgccataatcggtctttcaagcgaaccccacagcggatcggagtggtcttccatcgcatccattaccaacctgaactgggcggctgcccggattttttcggtatctgaggcgtctgcctgtttcagaacgcgcactaaatcattgaaacccagagtcacctgcctgacttcggcgccgctcagtgagtttacgtgtgtcatttttttcttaaagtagccaagcacttgcagagcctcatcatactgcgaatgccgcgtcatttggaaaacggtatccgaaaggtcgttcagttccttgagaccgccctcatcttcagctttggcagttgtgatgaaacacataagagcaagtaaaagacagatcgtcagctttcgtttcatagaggtccctcccactccttctctttacagaatatgaggagcgggacaaggttagaccaagattctatcagtgtaagtcaagctttacccgtcttttagaaatcaccaaatagtatgcaaggccgagtgaaaatatgctcagccagaatgtagcatagccgatctcttgcatatagtcattgagcattgagtagcggggcatcatgccgaaaagataatcaatgacatcattatgaagcgtccaaacagcggcaacggcaagatgccataaccggaaccgaaaatacgggctgtataaaacgccttgaacggccatggcaaaatgtgaagcaatcagcatgtacccttcccaaggcatctgccccattttgaccagcacaaagacattcattccgaccgcccacatcccgtattttacaagggttacaagagccagcgcttcaaacagcggcgcgtttcttcccatgagaaatgccagaagcacgaacaggaagaaaaacgtcgccgtcgggctgtcaggcacaaatatcagaaatcggaacggcgtgtctgcaagctgaggcacataccaataatagccgtacaccgtaccgataaaattaacggcaagaacaagcagaagcatgccgcgcaaccctaaaagataagaaatccacctcataccatcaactctcagtccgtaaaaagtatgtatcatgcaaaaaaagctgacatccggtcagctcttttcataaaagtatatcctgctattgtctacttcacaatacgttatttcgctgtcgtttcagaaatgaacttcgccagctgatcaagctgtttgtcattccctttaaaaataccggctggcatctgccctttccctttgacggcgatttttttaatttcttccgggctcagcccgttatcgaccagggacggaccggcgcttccgccttgaagattatccccgtgacaggaaatacagccttgttctttaaataccttataaccgtctgattcagtatcaatggcggcttcttttttgattttcccttgctcctccgccttcgcccagtcatgcgtcgcgactgactgccacgttaaaaagaccgtagcgcaaagcgccaaaagcatcatgccgaccgcaaccggacgcttccacggccttctttcagaccccctgtcgagaaacggagccaaaagcagcgacccgaaggcaagacccggtataatcatcgcgccgataacggtgtagctccctgcggcatattcatattttaatagctggtataaaaatagaaaataccaatcaggcagcggaatataccctgtatccgtcgggtccgccacccgttccaaaggcggctcgtgcacaatcgttaaaacgagaaatccgacgaggaaaacggccccgaccatccattctttcagcaggaagttcggccaaaacgcctctgtctttccaggatactctgaatagtctttcggtatattcggttttttttcagccggtatccttgaatctcctacaaacttcattcctttcccccggtgcatgtcatcccctcccttttatatcagatttgtattaaagcggtcctgaaattccctgcttgcggatcatgacaaagtgggcgcccatgagcgcaaacaaagcggcagggagaaaaaatacgtgaatcgcaaaaaatctcgtcagcgtttgggcgccgacaatatcgtggtggccggcaagaagagttttcacctgcgctccgatcaatggcgtcgcctccgcaatctgaagacctacctttgtcgcaaacagcgccttcatatcccatggaagcagataccctgtaaaaccgagaccgagcatcacaaaaaagatcagaacaccgacgatccagttcaattcccgaggctttttataagctccctgaaagaaaacccgcagcgtatgtaaaaacatcatcacaatgactaaacttgcaccccaatggtgcataccccttacaatctgcccgaaagcgacttcattctgcaaataatacacagattcccacgcgttttttatatccggcacataatacatcgttaaaaacatcccggacaacacttggataacggttacaaaaaacgtcaaaccgccgaaacaatagacaaaagccgagaaatggtgagcgggatttacatgttccggcacttcatggtcggcgatatcccgccacatcggcgtaatatcgagacgttcatccacccagtcataaattttgttcagcatgtcacccttcccccctaggctttgcttttccaagatacaaaaagccgtcctttactttttgctcataacggtcaagaggcgcgagcggcggcgtgcccggaacgttcgtgccgtctttttcatacagcccgtaatggcagggacaaaagaacttgttcggatttttaggatcattgttccagtttacggtgcagcccaaatgcttacagatcggagaaagcgctataatttcatccccatgcttgtaaacccaggctgacctggattcttccgattcgtaccaggcgtcgacttgatgaattttaaagtcaaaccgcttcggctccttcgtcagctcatccacactgacaacctgcaccattttttgatctcccgtcggttttaataccgggtccagcgcaaaacggaccatgggcataagcgcactggcggccataaatccccccacgccggtgagcgcatagtttaaaaattgtcttcttgatatatcttgttttccgcccatctcttccccccctaaagattgaccaaaaattaactaaaatagaaaataattctgagatttgacaccctcataatatatgaatctttcagcaaggtcaacagaggcaaaacgggtgttttgcgggatgcctggtgttttttaagaattgttccacttctgtaacaaaacgttcaaaatttctccgcacttgtcatccgcaatttttctctttaaagagtctttcatatgttcaaacggaacggcaggtatgtatatgacatcagaacctatttcagaatccttccatttttcgtctgccgtcaggaacaagacgtgccgaaagttggtcatcacctcgtctttgagtttttgaagcagggcgatttgtgattggtctatatcaacatatgtataagaggggaataaatatacccgtcccttcaattggcgctcaagctcttcagaaagcaattgggtgctttccccctgttcaacggcctcttttaagcctcctgaagatgttatggaaattaacggaatgacagcggtatcaatgtaatccgcagattgtaaataggcatcggcatcagcggccctccatctcatgtctcgttcctcctctttacgcaacaagccttgcatattctgcaaggctgtcatttatgtgagctgattcaattggcgggaaagcttttcaaatgtttctttgtcgtggcggtccagcgcctcgtcgatatctttaagcagcttttcccgctggaaagtggaaatggcatgttctaatattttttcggccatcccctgatcctgtttattttcaaacaggtctttcggcagatgcggatttgattcaagaacagcggcatattccggtgagctgtaggccgaacggaaattcagctggataaataaatcctgctgtttatttaaccggatgtcgtgaaaagatttttccgcgtccgtagtcatgacattttctttgtaaaacctaaacggcacctcatcaacgcaatgagtagacatgataatgcctcgcgggcaaaattcggcttgttctacaaaatggactttttccattaatgaatcatgactcattaaataatttaaaatccagacgcactcccggcgtttaagctgataatgatttaaaaaccaacggataaaatcctttttttcattgacagaaacaggggtctgcatgtaattccctcctctatcgatcgtataatctgacatcacttatacattcagcaagcatggtccaaaatcctgcttatcttaaaaattcatcctctatccgtaagattgtttcttcaagctcttcgtttgttccatccattgaaagcacttgttttaaaagcggcagcgcttctttctggagaccctcttccaataagaagtgagcgtattcatataagaaatcccgatcatcctgataatggagatacgcagcttcgaagctttttttcgctttagcgtattgctcaaggcctgtataagcacccgccaaataccaattgtatttcggatcttcttctccgtagccgcggacttcctgaatcagatcaataatctcttcaaagctttcttctttatgatagacggctaaaagcgtatggagcgcttccacgtaacccggatcgagcgccagcgcttcctgaagaagctttttgccttcctcttcgttgccgagctttaacgccattttcgccgcatagagaaaaagctctttattgtattcatcgtaagtaataccttctttagcggtttttaatgcatcttcatacatgccttctgcctcgtagctttttgcaagcggcatataaagcgatgaataggaaggatcaagcccttttaaatcagacagctgcttgatggctgttttgaccattcccgcctgataggctgtgaacccgtacccgaaaatcgtattcggttctgtatgttctgccgccgctttttcataccatgaaatcgcttcctcaaattcacccgccgcgctcaatgactcagccagcctctgatgaacatttacgccgccgatttcgtgccgttcttttgccgtctcttcatagtaaggaacggcttttgcgtatgatccctgagtgaagtataattcccccagagcgaaatcaataacaggttcatcttgtaacatcgctttcgcctgtaacagcttttgctcacttacttcaaataagccctgcatctgatacagatcagccattaaaagaaggctttccgcgtaagacgggtcttccggagaaatcgtctccagcacctctagagctttttcttcttcatcaatatctattaacaattcggcgtaaaaattcgtcagctcagactcatccggataaaggtcatgcagatcactgatcagcgctaacgctttttcggcgtttccccattcatagtagagctgggctgcaatggctttgtcttcgtcatgaagctgcgtttcagcttttgaaagcactttgagtcccttttcggtttcacctgcttcaactaattttatggcttcttggatcaatgtattcaaatcagaccggtcctttcttttcctatacctcatcaaccaatgaaaagggtttttattcgggttattcttatcataattcagacagggcctgcccgcaaataagatgcttcacccggcattatagtttatcagaaaatgcttaagaggaaaacggcaaaaaaggggacggcatctttatacgcaaacagcgcaatttgttccggctgtttctgtaacgaaaacgcattccccctttctgttattttctgtttaagacaagctatgtcaaagcccaaagttttatgacacatgaagaaaaaagcccgaagaatctcttcaggcttttttggctaattgatctaaatgctcaaaaaatgtcggatatgagacatggattgcctcagtatcacggatgtcaatcggctcttctgtcaggcatgaagcgacaccgagcatcatgccgatgcggtggtcaccgtggcttgacacatcggctccgcccgcaagcgtttttttgccgtgtattttcatgccgtcttcagtcggttcaatgtctgcgccgattttccggagctctgatacgacggtgtcgatccggttcgtttccttcaccttcagctccgcagcgtctttaatgacagttgtgccttcagcctgcgttgccaaaagggcgataatcgggatctcgtcaattaaacggggaatgatttctccgccgatttctgccgctttcagatctgaagtttcaataaccaggtctccgtaaggctctgcgctgtccgcttctgaaggaatcacttcaagtgaagcccccatttgctttaagacatcaatcattcccgtgcgtgtcgggttcaggccgacgtttttcagcacaatccggctcccgggaacgacagcgcctgccgcgaggaaaaaggctgctgaagaaatatcgccgggcacgaaaatatcagccccccgaagcttctgaccgcccgttacggaggcgctcgtctccgtttccgcaagctcggcgccaaaagcgttcagcatccgttccgtatggtctcttgatttatgaggctcagtgacggtcgtcgttccttcagcctgcaatccggcaagcagcacggcggatttgatctgcgcgcttgcaacaggggagacgtaatcaatgcctttcaattgtccgcctcttacggataaaggcgtaaatcctccgtccgctcttccgtcaatcgcggctcccatctgttttaaaggctccgtcaccctcttcatcgggcgctttgcaatactttcgtcgcccgctaccgtactgtgaaatgggcgtccggctaaaatgccgagcatcaggcggatggtcgtgccggaatttccgacatcaagaaggctgtcaggctcacaaagtgcgtcaatgcccttcccgtatatcgttacatcacttccgttttgttcaatggagacacccatttttctgaagcaggcaatggtgctcagacaatcggctccgggcaaaaagttttttaccgttgtggttccttccgcaagcgctccgaacataacagaacggtgggagatggatttatcccccggaatatgaatttcaccgtttaaagacgtcactttttctcttttcaatgttttccacctcagtcagcgtaaaatgtgtcatatttggcgcgggattgaatgcaggtttccgcacgcttccggtcatcatcagtctggaaactgattctgagaattccgttaatatcttctcttgtttcgataatgcggatgttggtgatactgattttttcttctgccaatatcgccgtaatttccgaaatgacccccggatgatcgggaacatcgacataaaggtcataaaaggacgggatcgctcctttttgacggagcggcagaccgtcgcgataatctttcgcttttttaaaatatccgaacaggctgtccgcatcttcattttctacataagactcgatcgtgtcaatctcccgtttccattctttgaagcggtcaagcagtttatctttgttatgaagaagtatgtccctccacatcgccgggctgcttgaggcgatcctggtgatgtcccgaaaaccgccggctgcgaaacgtttcaaaaacggataatcttcttcagcatgatgagcctgatgtacgaggcttgcagcaacgatatgagggaaatggctgatgacgctcgttacgccgtcatgctcctcgggggtcatctccacaaagtgggcgtttgccgctttcaaaagttccttcagatgcgttactgactctttagaagttgattttccgggtgttaaaatataaaacgcattttcgaataaaaattctttcgcggcagcggccccggatttatgagatcccgccatcggatggccgccgacaaattgatagtgagccggaagcactttgtcggcgtagctgacgactttctgtttcgtgctgcccacatccgtaatcaggagttcatgggtgatgtctgatgcggccagcacatcgagcattttcagcgtttgggcgacaggcgtggcgataatgacaacagacgcttgctgcgccccttccgtaaatgagccggcccgctcgtcaataattccgagcttcagcgcggcagtgagctgttcttccgaaatatccataccgataatccgtttatgcggatgctcctttttgatggccaatgcgatcgatccgccaatcagcccgatccccgcaagcaatatagtatccttcatttcactcatttcctttttcaactattttaatagagcaaagaggtgatgcctgatcacctcttataatatttcagctaaaattgtgagaatttcctcattctgctctttcgtaccgaccgtaatccttaacgctgtcggaaatccgagcgcctgtcctgagcggacgatatatcctttttccaacagggcttggaacagttcatccgccgggcggttaaaatcaatgagcacaaagttggtttgtgaaggataacaagttaatccgtgagtttctgcaaaatcataatactgcttaaggcctgctttatttttctcgacgcattcctgaataaatgtctggtcatcaagcgctgccagtgccgaagcctgaccgattctgctcgtattgaacggctctctcgccggttcaatctggcggatcagtgcttcgtccgcaatgccgtatccgacgcgcagcgcggcaagtccgtacgctttagagaaggtgcggaggatcataacattcggatattgctttaaaagcggaatgctttctgggtaatcttccgccgtaacatactcgtagtaagcttcatcaagtacaacgagtatatgctcgggaactctgtttaaaaaggcaattagctcttgctcagaagtatatgtccccgtcggattattggggttgcatacccatatgactttcgtctcgccgtcaattgcttccagcatccggtccaaatcatgagcgccgtcactgcggagcggaacctcgcgcacctcagcgccttcaatcaccgcattgtgtctgtattgcgggaaagtcggggcggcggtaatcgtgtttgcctgatcatttaataaagaacggcagataatctgcacaagctcatcagagccgttgccgaaaatgatcgaagattcactgacctgcagatgctcactgagccgtgttctcaaagcggcactgtaaccgtcgggatacagcgcaagctgctcaatctcctgatgcagcgcatctttagcggcctgtgaacagccgaacggattttcgttagaagcgagttttactactttctcaagcccgtattccattttcacttcttctattggtttgcccggctgatacggtttcagctgccgcagctgttctttaatctgcaaatccagtcacctcattttacactgtacagtcgtccgaacgtctttgcgtattcttcaaattcaagaagcgcatcagctcttgtttcgggattcacaagctttgttttaagctcttcaacttttttgacaagcgcgctgccgacaacgacaccgtcagatatttcattcatcccgtcaacctgtttgcggtttgaaatgccaaaaccgaccgccaccggaacagggctgaattctttcaccttacgtatgaaagagtatacagacgggtcgaattcgctgcgtacgcccgtcactcctaaagaggatacacaatacacaaagccgcaggcctgttcagtaattattttcaaacggtcttcacttgtcggcgcaaccagagagatataagcgatgttcgcctttttgcatgtcatttgcaaaagggcgctttcctctaatggaaggtcgggtacaagcagaccgtctatgtcgttttcccgcagtaaagcgaaaaagtattctttttctaattgtaacacaggattataatacgtaaagaggataattggaatatgaacgccgttttttttcattttgccgccaagttcaattgcttttacgatattcattccgttttccagagcccgttttgaagcccgttgtatgacgggtccgtccgcaagcggatctgtgtaaggaacgccgatttcaagggcagaggcgcctgcattctgcaatgatattgccagctcaacagaaatgtcaggaagcggatcgccagccgtaataaaagggataaataatttttcagaatctcgcagattaaacatgtgtccccaccccgttttccaaaacattcatcagcgtatgaacatctttatctcctcttcccgacaaactgacgagaatgattttgtctttatccatgtcttttgccatttcaaacgcttttgccagagcgtgggcagattcaatagccggaagaataccttctgtttcagaaagcagacgtaacgcggcaatcgcttcatcgtctgtcacgctttcgtacgttacacggccgcttttatgcagataagcgtgctcagggccgatccccgggtaatcaaggcctgctgaaatggaatacggttcgataatctgcccgtattcatcttgtattaaataggtcattgaaccgtgaatcaccccgagcgtcccttttgcgatcgttgccgcatgcagcggcgtatcaattccttttccggcagcctcggcgccgatcagctcaatatcttcgtctaaaaaggcctgaaatatgcccatcgcattgcttccgccgccgacacatgcaacaaccttgtccgggagcgttccttcaacccggcggagctgttctttcgcttcctcgccgatgattttctgaaattcgcgaacgatatacggatacgggtgcggccccactacagaaccgataaggtagaaatgatcttcacaatgctggacccaatacctgatcgcctcattcgtcgcatctttcagcgtgccgttgccgcttgtgaccggcaccacttccgcgccgagcagtttcatccggaatacgttcaacgactggcgtgcaacgtcttcttcacccataaaaactgtacacttaaaaccgaattttgcggcggctgtcgcggcagccacaccgtgctgtcccgcaccggtttcggcgatgattttcgttttgcccatctttttggcaagcagaatctggcctaacgcattgttaattttatgagagccggtatggtttaaatcttctcttttcagatagattttcgcccctcccaaataatctgacaccctgtctgcgaacgttaatgcggtcggtcttccggagtaatcaaacaatagctttttatattcggcatgaaaaacgggatcattctttaattctttgaaagccgtttcgatttcctcaaggggccgcatcaatgtttcagggacaaatttgccgccgaattcgccgtatcttccgatttcatttggatatggatacatagtggttcatcctttcttctaaaagccggatcagtgtttgatccttttgtccgtttttttcaattccgctggcaagatctataccgcacggacgcgatctcagtaagccggtaatcgtttcaggattaacgccgcccgcaataaaacagcgcttgcttgcattttgagcctgatttcggtacaaggggacacgagcccatgaaaacgcgattcccgtgccgcctctcattccttttactgaagaatcaatgacatagccgtcgacagcaggtgcaaattgagccatctgacgaagcgtcccttccccgtgatggagcgctttccatatttccgagcgcacaagcggacggaggcggcgggcatcctcaggcgattcatcaccgtgaagctggatggcgtcaagtgccagatcagaggcgatttgcgcgatgttttctatcgtttcatttacaaatactccgacatgtttcttgtctgtccagacctgctctttccatttccggacctcatccggcgttactctccgtttgcttgcggcaaaaacaaatcccagataatccgctcctgaagctgccgcaagttcgtaatcacgcttcgatcgtatcccgcagtactttacctcaggctttttcatatcatcactccccgaacagtccgcggatcgccttttgctgcgaatcctctctcattaaggattctccgaccaatacagcctgcgccccgtgcttgttgacgaattgcaggtcagccaaagaaccgatgccgctttcgctgaccagcaggcagccgtccggtacaagctgcgctattttttccgtttgcgaaacagaagtacggaacgtttttaagtcccggttgtttatgccgagaatgtccggctgaaacacttgtaaaatccgttcaagcacagtttcatcatggacttcaacgagaacgtccatgcccttctcgcgggcttccagataaagctcatgaagctctgaaggttccagcgcttccccgatcagcaaaatggcatcggcgccgatcctgaacgattcctccacctgaagggaatcaataataaaatcttttctcagcacgggaagagacacggtttgtttaacatctgtcagaaattgatttctcccctgaaaaaaacgggtatccgtgagaactgaaagggcgtcggctttagccgcttcataatccgccgcaatcgtttccggaacaaaatgctctttaatcaatcctttagacggcgaagcttttttcacttcggcaatcagcccgataaaacggttcgggttctggagcgcttttttaaaggatctccgttcaatttgacaggtttccggcagcacgatggatttgatttcttcttttttctgctgaatgatttgatcaagcatacatttcttcctctttctgtttcagacgttcgagctgccttttggcatctccgttttgaatcgcttctaaggcggttttcgttccttctttcagatcgtttgcaagacctgccgtataaatggccgcgcccgcatttaaggcggtaatatgcagagcggatgacggagctttatttgcaaaaatattctgaatgaggagcgcgctttcttccgatgaactcacttgaatatcctttagtgaaccttctgcaaaaccgaattgttcaggtgaaacggaatattccagacgttcaccgtttttcagttcaatgatatcggtcggtgctgagatggacaattcatctaatccgtcacgggccgacacaagcatgacgtgtctgacatcaaattgttccagagcgctagccatcaggcgcgctttatcaaatgaatagacgccgatcacctgccgcttcacctgcagcgggttgctgagcgggcccagcagattaaatacggttcggaagccaagctcttttcttgcggcggcgacgtgcttcattgacgaatgaaacagcggcgcaaacaaaaaccccatttgtttcatttcaatgctgcgtttgacgctgtctggagtggcttgaatggaaacccccagcttttccagcacatccgcgctgccgcttttagacgaaacggagcgatttccgtgcttggcaactttagctccggcagcagaagctgtaattgccgctgccgtggatatgttaaacgtagaaatcccgtctccgcctgttccgcacgtatcaacgacatccgtcaagctacctgatgtctgtgcccgcgcccgcatcacttttacaaatccggcaagctcctccgccgtttcacctcggtgggctaacaccgataaaatcccgccgatctcagactgcgacatgtccccgttcatcatcatttccatcagcttttcggcttctccggttttcagcgtacggccattaacgcacgattgcagaaatttgttcatccgtcttctcctccccgccagaaaagatgtcttctgcgatttgaatcgtttttaaaagcgcccccgctttgttacagctttcttcatattcggcttccgggacggaatcggcgactattcccgcgcccgcctgcaccgatgccgtaccgtttttgacactcatggtgcggatggtaatacacgaatcaattgacccgtcaaatccgatataagcgatacatccgccgtaggtttctctggaagtcggttctaattcatttaaaagctgcatcgcgcggattttcggagcgcccgtgagtgttcctgccgggaatgccgacatcagcgcgtcaacgggatggatgccctgctttaaacggccggttacaacagagatgatgtgcatcacatgtgaaaaagaaacgacctttgtgaattccggaacggctacggaaccgtactccgcaactctgccgatgtcattgcgcgcaagatcgacgagcatgtaatgttcagctttttctttttcgtcattcatcagctcttttttcaggcgttcgtcctcttcttttccggcgccccttcttctcgttccggcaatcggatgaatttccaggtgcctgtcatgcacgcggatcagacgttcaggcgaactcccgacaatgtctctgtcaggcagtttgatatagtacatatagggtgaaggattgatgatgcgaagcaccctgtacagctcaaatgaatgcctggataccggaatgtcaaacttttgcgaaagcaccccttgaaaaatgtctcccgcttttatatattctttcagtttattaacgccggccataaactcttctttcgtataattggatgtcacagcggcaaaacttggcgtgtcaaacgtttctttagaaaaaaacggctctttcatatctttcgattctgtcaaaataccgataagcttacgaagctccgcgcaattttctttaaaaacggcccgcttttcttcctccgtctcccggccgttaagctccgcatattgaatgaaatgcacttgtttcgtttcgtggtcgtacgcgatgattttccggcagacaaacagcatgcatttttcgaaatctgttactttcgcgtggcttggcacggaaggctcaatcaaaggaatcatgtcatagctcagataaccgaccgcccctcccgaaaatgggatatcaagctcgggtgttttaatgcggaagctctcattcatccagtcaagcacggcttttaattctccggcttcaaacagcgtatgcccatttggatcagcggcagtgaatgtgttatgactctctttaatcgtgataaaaggatcaaggccgataaaagagtatctcgaccagcttgacgactcatccttgctttctaaaagatacgtaatgtttctgtccagtttttcaaccatctgaatgggtgtgatcgtgtcgaccgtaaaagtctctgcgattggaatggtgcggtgtgtcagactgtcctttaaaaataaagaaacatccgattgtaaattcatgattctcctccttacggtaaggagaatgagatgaagagtgagaggagtcttgcgtataagaaataaacccaaaagaaaggcttcttttgggcagaataaaaacgtgtttatctcagctcagctaaactcattctctgctaccctattctaaactcaactgttcaatgtcttacttaccagctctatacacactcttgtgtatttctaagctttgtttatcgtattacatgtcagtattttttgtcaatgataaatccggccttaacacaacggctttttctaaatagacatgcttgatttcatcctgaggcgtatccgtctgaaccgtcatcaggacacggatacacttttgcagagcgccggtgacatccatttcctgcatgcacgtcaccgggacgtattgccacccggaaaggcggcggaccgcttttgccggaaatacggaatggatatcaggcgtggcggataacaggatctgtacaacgtcttccggcttgcatccattttgttcaatgattttttcaagcagctgctgtgttttttctaaaatttcttgtccggtgtcttgttccaccgttgttgctccgcgaatgccgcgtatcatcatgctgtttcctccattcgccatttgttcagcaaattttcgagctcatcttttgaaagcatgcagtcccgcgcttcgcctaattcctttaacacgataaactgtgtcatgcctccgcgcgtttttttatcattcatcatccgggcggagagaaccggcgtttcaatatcttgtctgatgcttcccggatagccgagcccaatcagccattgtgtaagttctttcctgttcatcttgcaacgtgcaacctgttcactcacgtaaagggcaaactgcatgccgagggcgaccgcatctccatgtgtaatccgtccgtagccgtattccgcctcaacggcatggccaagcgtatggccgaaattcagaaaagctcttaccccctcttccttttcgtcctcacgcacgacggccgatttgattgaaattcctttataaatcatttcattcagctcagcgcttgtcagtccttgcaacgtgtcaaacgtgagaagtttttctaaaaaagcatgatcggcgataaacgcgtgtttgatcacttcagccatgcccgatctcagctcttgttccggcagggttttcagtagctccgtatcgtaaatcaccgctttcggctgataaaacgcgccgattaagttctttccgagtttatgattgacggccaccttgccgccgaccgcgctgtcatgggcaagcagtgttgtcggcatttgaatgaaatcaattccgcgcataaaagttgctgcgcaaaagccggccaaatcacccgtcacgccgcctccgaaggcaatcatacatgaggagcggtccatatggaaagcgatcgcttccgtttgaatccgttcatactcttttagagatttcgcttcttctccgcttggaacgatcacttttttcacgggccatgtttcgtttaaaagccggaacatctcatcaccgtaaagccggtcaacttcagcatcgatgatgagaaggatctttgtcagcggcctgttcagtgaagacaaaagggcagcggcctgtttccttataccttcaccgatatacacgggatatgcggaggaagctgtccgaacctcaagctctttcatcagaattccctcgataattttttcatgttttcaacattttctttaattcggtcgatctggtcaagcccgaattgttctacgacggcatttgcgatttcccaggccactgctgcttcagccactacacttgctgccggaaccgcgcagctgtctgaacgttcaatgctcgctgtaaacggttctttcgtttcaatgtcgacgcttttcagcggcttgtacaaagtagggatcggtttcataacgccgcggacgacaatcggcattcccgtcgtcataccgccttctaatcctccgagcctgtttgtggcgcgtgtatagcctttctcttcatcccatacgatttcatcatgaacttcactgccgtttttgccggccgcttcaaaaccgatgccgaactctacgcctttaaacgcgttaatcgacagaacggcagcagcgagcttgctgtccagcttacggtcatagtggacatagcttccgacaccgaccggcatgccttcgacgatcacttcaacgattccgccgatcgagtcgccgtttgccttcgcttcatcaatggctgccatcatttgacggcctgcttcttcatcgtagcatctgaccggtgattcttccgttacccgttggagatcctcaatggatgtgtaatcggttttctctgcttttacgctgccgatttgcaggacatgtccggcgactttaatgccaagctcagctaaaatctttttagcgacggctccggcagccacgcgaaccgttgtctcacgcgcggaagatcgttctaacacatttctcatatcacggtgattatacttaatagcaccgttcaaatctgcgtgtcccggtctcggtcttgaaatctggcgtttcatttcactttcttcttcttctgtaatcggtgcggcgcccatgatttttgtccagtgagtccagtctttattttctacaacgagcgcgatcggtgaaccgagtgtccgggcatgccgcacgccgcttgtgatcttcgctctgtccgtttcaatctgcatgcggcgtccgcggccgtgccctttttgacgtctggcaagctcaaaattaatgtcttcttcagttatataaagccccgcaggcacaccttctataattgtcgtcagctgcggaccgtgtgattctccggctgttaagtatctcatttctttcttctcccttcatcgcattaacgcttttaagtaaaactataccacaagttttcattaaatgtcttctatcttttttgataaaaaaatgtatcagtgctctcaaggccgaatttttccgggctgaaaatctgttctgtactgccgacaaacagaattccgttctttttcagactgcccgccattttcacatacagctcttcttttgctttttcagtaaaataaataaagacgttgcggcagacgatcagatcaaaatcctgttcatagctgtcggcaagcaggttgtgccgcttaaaccggatgcttttttgaatctcttgttttacttgataactgttgtcagcctgcttagtgaaataacggcttttcactgaagccggcacctcttgcagcgagcgttcctgatagatgccccgcttagctttgctcagcgccttctcatcaatatctgtcgccaatatttcaaatccggccagtcccgtctgctgattgagaatcatcgccaaagtataaggttcctctcccgttgaacaggccgcgctccatatttttaacggtttgttatgctttattaacggaagaattgaagtttcaagaacttcccaccgtttataatttcggtaaaattcagaaacattgatcgtcattctgtccaatgtttcatttaataaaagcttgtccttttccaaagcggcggcaaattcctgaaaatctctgaaccccttcttttcataaagggacgtcagccgccttttcatctgtgcttctttgtataaagataaatcaacgccggttatttgtttccacttggtgataaaaatgtcgtaaggctccattgcttctctcccaatctcgctgtcttttgtcctagtatagcctgttttctgtcgaaattgtacgatttcaataaaaaaatcagcccgcgggctgatttgtgagaaacgaaaagacagggcagcgcagcctctgtctttcataaatgatgtaaaccttttcataatacgagaaaaagaaaggctgacggcttagtacacccagtcggccattaatttttgatacggtacaagctcttcctgtttaaagaaaatgtgaatttcccgctcagcgctttctaaggagtctgaaccgtgaatgatatttttgccgacaaacatgccgtagtcaccgcggattgtgcccggcagtgcatctttcgggttcgtttttccgatcagctgtcttgtgatctctactacattttccccttcccataccattgcaaatacgggtcctgatgtaatgaattccacaagctcgccgaaaaacggcttccctttatgttcagcataatgggtttcagccatctgttctgaaacttgcattagcttggctcctgccaattgtaagcccttacgctcaaatctggataaaatctctccgatcagctggcgctgtacgccgtccggttttaccatgataaaagttttttccataagattctccaccccatcattatgtataggctttcaagttgcacaccgaaatcgtaacatctttctgacaattaatcaatccagggcggagaatgttcacatcttgttcgtaaaaggaatttaaaatttccgtttgccgatatatttggcgatggcggccaatgatgagcgcgcacgtcctctcggcagtgtattcagtttttcaaacgctttttttaagtacctgtcactgacggctattgatttttcaatcgcgtctgtgcgtttaatattttcaataatgggggcgagctgctcctgtgttgtttcactgttaattaatttcagctgatttttcaattcaggctgactgagcgcgtacaaaacgggcagagtgacatttccttgcagcagatcccctccgaccggttttcccagttcctcttccgttgaagtgaaatcaagaatgtcgtcaataatctgataggacatgcccacgtaataaccgaaccaatataatgctttgtgaatcttctcatcagctcccgaagcgatggcgccgagctggcagctgacggcaatgagaagagccgttttccgtttgatgcggcgcaaataggttctgaggttttgttccatattgtatttatctctgatctgttcaatttctccgaggcatacttctacgatggttttggacaggatccggtgggctttcggctcatccaatctcgtcatcatctcaagtgagcccgcaagcatataatcaccggtatacatggcgatgcggttgtcccacttggctttgatggtcggttttcccctccgcagctcggcgtcatcaatgacgtcgtcatgcacgagggacgccatatgaatcatttccagcgtcaccgcaacatattttattttattaatgtcatagtcgccgaacatgccggaaagcaatacgaaaacagggcggatccgcttgccgcccgcctggagcaggtggagcccggcttcactcagcaagggatagtctgaccgcaccgtttgctcaagctccctttcgatcacatcaatatcgtcatttaaaaaagaataggccattttaaatttcatatcattcacccaaacatctgtatattcatcatttccaaccgatatgcgtagcagccactccgccggtaaacgaatggtatttgacattcgtcaggcccgcttcttcaaacagacgggcaagttctttcataccgggaaattctcttgccgattcttgaagccaagaatattctttatagctcttcgcaaacatttttccgaagaaaggcatgatgtatttaaaataaagaaaatatgcctgtctgaatccgaacatttccggctgggatgtttccagacatacgacctgcccgcccggtttgacgacccgccgcatttctttcagcacggtcagatagtcgggaacgttccgcagcccgaagccgatggtgacaaaatcaaaagaatcatcagcgaaaggaagctccatcgcatttccgtgcaaaagctcaatttggctgtaaccgccctctttcacttttttctcaccgatgctcagcatatttttgctgaaatccagtcctttgatttcgccgctttttccggccgcttctgcgagggcaatcgtccagtcagcagttccgcagcagacatcaagcgcttttgcgccttcttttacattcatgatctgcatcgttttatcgcgccattttttatgctgctgaaaactgataacagagttcatttggtcataatttttatagattttttcaaacacgccgtgtacgcgctgttcttttgactcctgcatgttgattacccttcttccactttctgatgatatgttttgtcctggctgatcgctttaagccggttcagcattaggttttgaattggtgaattgagcggcagcagcgtttcaatgctttgctttgcctttcggaagctatcttccattatgtcagcctttgatttccctgactttacaatattgccgatgacatcgagaaatatagcattgccgttcatcagccgcttatatacaaaaaaatcactcgccagctctttccagcgcggaagattaaagtggtctgacactctgtgaaacagggccgcttccacaatcgccatgctttcgatcaattgattcaagtcattgacagaccgatcgtacagacggattttatgctcattgatttctttaattgccgtagcgagcgtccgaatcatatagatatccttcatttcagataaaagcgaataatacagtccgctgaaatagtcgccggcaagcacggtgagctgccggtttttattttcgtctcgctttaacgctctggctgttgtcacttcatcgtgggtatcaagggcgctttggacaagcatcgcagttactatgtaattttctctgtcgttgttcttaatgtccgcctcttcaaacaaagcgtgaaaaagaagaagcttatcctcatcgattttaggcgcagaaatatgtttcgctaaataaggatgagacagcttttgttttaatttcatatttagattcgctaaagttccgtagatgtcttgcaaaaatatcacccttgtccccaaattcacatttattctaatatgtatgagatttactcgtcattattatacgcaggtatcattatagcataaaaaaaagaaattggctgtattctcccgccgtttgcgggcatttggcaaaagcgggaaacagccggcttattttttttcgctgttcatttctccgtaagcggtctggatgagggcgttgcctctcactttgatggcagaggtatgctcagtaaactgagcgataatcacttcgcctttgtccagtttttcggaatggtgaaatttcgtatccgttcctctcgttaaaccgatgacgttcacgccgtcctcgaccgctttaatgacgacaaaatcacttgaatgctttgaattcatatctgcaccctctatcattattaatccgcacgtttaatatgttctaacacttcggaacgcgccgctgcgtcatctttaaaaatacctcttacagcggaagtcactgtttttgcacccggctttcttacgcccctcatcgtcatgcacatatgctcagcttcgacgacaaccatgacgccgtggggatctaaggtctccacgatgctttctgcaatcgttgaagtgatgcgctcctgcagctgcgggcgttttgagacggcttccaccgcccgcgccaatttactcaggcccgtcactttgccgccgcgcggaatgtaggcaatatgcgcttttccgtaaaaaggaacaaggtgatgttcacacatggaatgaaacgcgatatcttttacaagaacaagctcctcatggtcttctccgaaaacggttttaaagtgttctttcgggtcttcatttaatcccgagaatacttccgcgtacatttttgccacgcgtttcggcgtatctaaaagcccttcccggtccgggtcttctccaatcgcctctaaaatctggcgaaccgcctgttcaatctgttctttattaacttctttcattgtctgtgtcctccaccattgaatacatttaatttcgattctagcacatttgccgcgccaaaagcaaaacgaaagtcctgcccggtgaccgaggctgcttaaatatgaaaagcccctttatcaaggggcttttctgtgaagaaacaaagtgtatgtatcagatgcatacacgatctatattcacaattattttcctgcaacagcgtctttaagagctttacctggtttgaaagcaggtaccttgcttgcagggatttcgatttcttcacctgtttgcgggttacgtcctttacgtgcagagcgctcgcgcacctcaaagttaccgaaaccgatcagttggattttatcaccgtttttaagtgcatctaaaatcgtatcaaaaacagaatcaactgcttttgtagcgtcttttttagacaattcgcttgcttcagcaaccgcattgattagttctgtcttgttcatgcctttcacctcctcccaaaagggtatcaaatcagcagtttattatcatttcttcacagttcagcctgattctaaacctgtctgataaaaaatcaaagcagggaagaacagacaagtaaacggcttttcaaaagaaaacagacactttgaggaatgtttgtccaacaaagtgaagattttctgtatgtagagtaacacatataaaaagccatatcaagcattttaaagcctcaatcccttgctcgtcaaggttttcacgtgttttaccgaacaaatattcctttttttgcttttttcctcctaatccttgattgatttccagtatctaaaaagaataaaaaaagaccccccgtttcaggaagaggtccttcagcttacaaaataatggcgatcaggccgcctgagccttcgttaataattctctccagcgtttctttcagtttatatctcgcattttccggcatgagtgacagttttgcggagattccttctcttacgatagagctcaatgatctgccgaaaatatcggagttccagatagaaagcggatcatcttcaaagtcctgcattaagtaacggacaagttcttcactttgtttttccgtcccgatgatcggcgcgaattcactttccacatccactttgatcatatgaatggacggagcgaccgctttgagccttactccaaaccttgatccctgtctgatgatttccggttcatcaaggctcatatcggctaaggccggggcggcaatgccgtagccggtctgtttcaccattttcagcgcatctgatacctgatcatattcttttttcgcgtgggcgaagtcctgcattaattcaagcaggtggtctttcccgcggatttcaacaccgacaacttcttttaaaatctggtcatataaatgatccggcgcatacaaatcaatttctgcgacaccctggccaagttcgattccggccagaccggcgctttcaataaactcaaattcactgaagtggccgacaacccggtcgacatcgcgcaggcgtttaatatcttttacggtttctttcactgattcctggtagctctctctgagccagtgattttctttcagcaccatgacccagctcggaaggttgacattgacttccagcacagggaactcgtaaagcgcttctctgaggacgcttaacacatctgtttcccgcatgctttcaacactcatggcgaggacgggaatatcatatttcgcgcttaattcagctctgagcgcttctgtttccgggtggtacggttttaccgagttgatgaccataataaacggtttgccgacttccttcagctcgtcgatgactctttcttccgcttccacgtaatcgccccgcgcaatatcgccgattgagccgtctgtcgtaatgacgacccctattgtggagtgttcctggatgacttttctcgtaccgatttccgctgcctcatgaaagggaatcggttcttcgtaccaaggtgtattgatcattctcgggccgttttcatcctcatatcccttcgccccgggaaccgtatatcccacacaatccacaagacggatgttgacatccagtccttccgcaacatgaacggacatggcttgattcgggacaaattttggttctgtggtcattatcgtttttcctgctgcgctttgcggaagctcatcctgcgcccgcgctcgatcggcctcattgctgatattcgggagcaccacgagctccataaattttttaatgaatgtagatttccctgtacggacagcgccaacgactcctaagtatatatcgccccctgttcgttcagcgatatccttgaaaatatcgaccttttccaagtgatcccctcccggacttcctatccttatcatttttcattcaccattctccaatcaaatacaggacactatatgtgtatgacgttgtcctatttcaatatgacatctttagaaaattttcaggcagtcttttctatcaaaatcaaaaaaacctttctccctatttgtatgcgcgggaaaaaggttcattcctgtttcgtttgactttctaaaaaaacgggttcctgtttttcatttacggtgtatgtgactgaaaaggccgggacgaaaggagtctctttccataaaatatcttgaatttccgcgcccggtttgattttctttttgttttccttcaggcagcgggcgagatcgacgcgatagtcggcatagatttctccgtcagcgccgattaaaagcggcagagacgtgcctgaaaccggacttttgactgaaggagagtctttcatgccgagcttttttttatttaaagtgaaaagcccttttgaaacggcgtcctcatagggaggatatgtatgcttttcctgatacattttgacacgcagcttcatgtcgcggattgcttccgccatttggagatcgaccagcttgacggtcggcttatgttccacatcgacaagcacgtattggtacattcccccgctttcataagctgaggccggcggctcctctatgtatctgggcgcgagccgcttaaaatctatcggatatttttgatagagcggtgttttcatatcttttgtctgaatcggcagaagtccgccgttcgcctttttaaattcatccactgccgcttgcacctgctgaagctgatgtttgtaagatactttattttcagttttttccgcttcagggtacagacagccggacagcaggagcaccgccattgccgttatgacggccatttttaacttatgcattccgcgccccctttttgctttattcattgacaggcccgctgaaaacgaccattaacacgatcaatcccgagatgaccatgcaggcataagcaagtgaagaaaccgctgcttttatcagtttgtttttcactttgtacctgctgacataaatagaggccaccgcaacaaacattaatcccatagcaccaagcgcaaaccacattttcatcaatgccacactcacgttcgtgccccccgtcccatcattgtaagcgttatatttcattttaatatacaaatgttgaaaagatcaacaggttttccatctattgaaaaaacaaaaaaactgaagcaaagagggggactttgcttcagtcaagttgactatattcacctgtacgtctgagatacactctcttggacttcgatgctatagtatgcgcagatgcatacgtctgcatcctcttctgcctaaatcagcaaatgttttaagcgatttcagccggagagttctgcgttttggactttcgtcacttcagaatatgctgacggcatgttattgtcacttcacccggttttcgaatgtgttgaccaagtcttccatctcatgggttttcactctggccattaaggattctacggccgtttctaccttctgcccgttaaataatacttggtgaagcgcctctgtgatcggcattttcacttggtatttttgagacagctgatacgcagctttcgtcgtccgcacgccttcaacaaccatccccatcttatccaggacagcttccagcttatatcctttgccgagcaggttgccggcgcgccagtttcgggaatgaacgcttgtacacgtcacgattaaatcgcctacgccggtcaggccggaaaaggtgagcggatttccgcccatctttgtgccgagtctggcgatttcagcaagacctcgggtgattaaggccgcttttgcattatctccgtatcccaatccgtctgtaatccccgctgcaagagcgatgatattctttaacgctccccctatttcaacaccgatcatatccggattggtatagacgcggaaatgctggttcatgaataaatcctgaaccgcttctgcagccttgatattttttgaagatgatgtaacagtcgtcgggtgtcttaatccgacttcctcagcgtggctcggccctgaaagcacgacgatgtcttttctgtactcctcaggcagctcctcttccattaattctgaaatgcggagaagcgaatccggctcaattcccttgctgacatgaacaaaaatcgattgtttcgggatgtacggcagagcctttttcagcacttcccgaatggcttttgtcggaactgccacaatgatgaagtcagctccttttaaagcctcgcttaaatcagctgtaccgatgatagaacttgatagctccacccccggcaggtaatctttgttttcatgcagttcgttgatttgatcgatcaattcggcacggtgtccccacatcatgacttgatgtccgttatcagccagcactaaagaaagtgcagtgccccagcttcccgctccaagcattgccacttttttcatctctgtatcacacctttttattttcttgctcttgcaaatattttaattggcgtaccttcaaatccgaaagcgtcccggattcggttttctaaaaagcgttcataagaaaaatgcatcagttccggatcgttgacaaaaacaacgaagctcggcggcttaacagcgacttgagtcgcatagtaaattttcagacgggagccgttgtgcgtcggagtcggattcatggcgaccgcatccataatgacatcatttaagacatttgtctgcacgcggagagagtggttttcactcgctttaataatcgcaggcatgagtgtatgaatccgctttgtcgtcagtgccgacataaacagcaccggcgcgtaatcgagaaattggaaatgttcccgaatattctgttcaaattctttcatcgtgcgctcgtctttatcaacggcatcccatttgtttacgataatgacgacggctttcccggcttcatgggcgtatccggcgatccgcttgtcctgctcaaggatgccttcttctgcattcagcacaacgccgacgacgtctgagcggtcaatggcttttaacgcccgaagcacactgtatttttctgttgtttcatatactttacccttttttctcattcccgccgtgtcaacgattacaaattcctgctgattgtaggtgaacgccgtatccacagcgtctctagtcgttccggctacgttgctcacgataacccgctcttcgccgagcatcgcattgacaagggatgattttccgacattcgggcggccgatcaggcagaattgaacgacatcatcactgtacttcgtctccggaatgtttttaaaatgctcggcacaagcatcgagcaaatctcccaatcctaaaccgtgtgtgcccgaaatcggatacggttctccaaagccgagcgcataaaagtcatagatgttcgctctcatttcggtattatctaatttattaacggctaatacgaccggttttttcgtccggtacagtatttttgccacttcttcatccgcagacgtcacaccttcgcggccgttcaccataaagatgatcacatcagcctcgtccatggcgatttcagcctgctggcggatctgtgtcagaaacggttcgtctccgatatcaattccgcccgtatcaatcaggttaaaatcataattcagccattccgccgaactgtatatccggtcccgcgtcactccgggggtatcttctactattgaaattctttcacccgcaatccggttaaagattgtggattttcccacattcggtcttccgacaatggctacgacaggtttacccatagtacccttcctttcaatccagccgcttacattttcacaaaaaattgttcaaccggttattaaaaatcatcttcgctatgaaaagaacccttcaaacagaagggcttaactcatttattatatcagttttcactgagatcacaatgtattcttcaaaatgtttcgcattcatgtaacagtctccgtctgttttcaagacatttttgtcgctcctttgccctgctttttgcttttttggctgatgcgcgccgcaagctgttcatatgtagtcagcccgacgagaagaaccactcccgccgaacagcctgaaagccacttataatccccgacggctgccgcacccgcaatattgcggatgaccgcagcatacaatagctccccctggcacatgccgagaacaaaaagacaaagcctctcagggaaccgcccctcaacggaaagcgtaataacggtaagcagtataaccgccgcccattcaggttttatgataaaccaaacaggatcatataatgcaaaaagaaaaataaagccgtacgccgcagccgccgtcagatgaatcacaatattacggagccgtttatgcatgccgaggcttcccgcataaacaaatgccgcagcaaaaaacatgacatatgccgcattcagcgtaaaataagccgtaatctgatgtatgcttgccatcatattagtcaaaataaagactgatacgtaaaaacggcttttcgttttggcaaaaataaaagtcgcaagtatccataaaaaccacattgaccagtaataataaaacggttccataatcgctcctcctctgatcagtatggagcgggaacgcattttttaaaccaattatgcctgaaaggagcggataaggatgggaaaagacagacaggagaaaaaactgaaagcctcccgacgagtggaatctgatcgcgatgattcgattcaccataaaggagcgacaagccttgagcaaaacggggaattccgaaaaagaaaatcgtaaaaaacagaaaaaggcatgcgggttcgcatgccttttaacgtctgctgaaacaggacgtgtcaatcccccgttcagaaagccagtgatgtgtgtcaccttttatgaccaaaggcgccttttgcaattgggaaaccgattggcatccgagggcggtcataatcattttcagctcttgcaaaagcgccgtcatctcgtcaaacaggccctcttctcctttagaggtgagagctttcaggaaagtgcccgccattcccgcgccggaagcgccgagggcaatcgatttggcgacatccagggcgctttgcagcccgccggatgcgataattgattgatcagcggagagcgagtggatttccgctaagcttgcggcagtggaaattccccacgtattaaaaaaatgaagcgccttctctctgcgcatattttcgatcttagagaaatttgtaccgccgtatccgccggcatcaactgctgctgcgccagcatcaaataactgccgtgccgattccctgctcattccgaagccgacttctttgacaaaaacgggaactcccgcttccgccgcaatccgctcaatacggcagagagcgccagtaaagcttctgtcaccctctggcatgacgatctcctgaatcacatttaaatgaatctggagggcatctgcttgaatcatatcaactgctcttttcgcctgctcggcatccgcctcgctgcctaaattggcaaatatcagcccgtccggattctcttttctgacgatctcataagaacaccgttcggagggatcttttaaagctgacatttgcgaaccgacagccagcggcatgccggctttgcgcgccgctcttgccagcgatctgttaatttcgtatgtaagctgtccgccgccgcctgtcatcgcattgataaaaatcggcgaactgcttgtgagtccgccgattttcgttgatatatccactttttccaatgctaggttcggtaggctgacatgaacaaacataatatcatcaagccccgtttcccggttttggccggtagacagcgcatgatttatatgttctctttttcgttctgctcgtgtcacgttttatcaccaatttattttaatttattaagcttgtctccgattaaatcgccaagctggaagccggtgctcggctcttctttcgcctggtattggcggaagtcctcctgatcggctttcggcgcttcttcaagctcacgcatgcttaaggaaatgcgctcttcgctttcgttcacgtcaagcactttcactttaacagtctgtccttcttcaagcacttcatgcggcgttccgatatgtttattggaaatttgcgaaatgtgcacaagtccttccacgcccggaagaatttcaacgaaggcgccgaagcttacaaggcgctgcacttttccttcaagcacatctccctgttttaccttttcgccgacctggctccaaggtcccggcagcgtttctttaatagataaagaaatacgctcgttatcgcggtctacggacagtactttcacttttacgtcctgaccttcttccaccacgtcagacggtttttcgacgtgtgaatgagacagctgcgaaatatgaacaagcccgtcaattccgccgatgtcgacaaatgcgccgaaatcagtcagacgctgcacttttccttcaagcacgcttccaacctcaagcgtttggagaaaatcatgttttttggctgtctgttctttttccactacagcccggtgtgacagaatcacccggtttttatcacggtcgagttcaacgacgataagagagagggttttccctttatagtcagtgaaatcctcgacgaaatgagcttcgacaagtgatgcgggaatgaagccgcgaacgccgatatcaacgacgagaccgcctttcaccacatctttcacttcagcttcaaacacttcttttgtgtcgaattttttttcaaggtcttcccaagcgcggtcagcatcaacggcacgtttagataaaatcaaagcatcgtcttccacttttgttactttcaggtcaagctcgtcgtcaacttttacgacatccgatgctttctctacatgaagacttgataattcactgattggaatgattccggactgtttgacattgacaatttcgacatctacatgcttgtcctctacctttgtcacaatcccttttactacatctccaacctctggcacttgaacatcaatttgattcatttcctctgtcatttgaataacctccttggtccaaacctacacagcttaattaatacggtttgaaagctgaacatgtgaatgtccgcttttcagccgaatatgtattaaagaatcatccaaaaaagattttgaatgatcaataaaaagttttattagtattaacttctaataaatggactggtttgtcaagcaataacatcttgtctttcgaaaaaaattataaagcgctccgcccgaagttaacgtgatttctgttcgacgatctccagaatttttcctgcgacttcggcaatgctgagtgacgtcgtatcgatttcaatcgcgtcttccgctttgcgcagcggggaaacttccctctctgaatcgagtttgtcgcgtctggaaatttcttcaatgagcgtctcgtaattcacgtcatagccttttttcttattctcttcatatcggcgcttcgctctttcctctacggacgcgagcagaaaaattttcacttcggcatcaggcagcacatgagtaccgatatcacggccgtccatgacgacaccgcctttttgtccgagctgctgctgtcttttgaccatttcttctctgacgcctttatgcttggcggcgattgatacttggttgctgacttcgtctttacggatttcttctgtcacatcttctccgtttaccagaacgatttgtccttccggagcggatacaagctcaatttccgtacgcttcagcagctctgtaagcgctgcttcatcagttaaatcggcattctgcttgagcgccgtatatgtaatggcacgatacatcgctcctgtatcaatgtacacatatgattttttctcagccactattttagcaacggtgctttttccggcagcggccggcccgtcgatcgcaattgataatttcttgtccataatctctctccttgctctttactcctctatggattgtatcatgaactgccggaaaaggggcgaaaaaattgagctgatttaccgctttaccgtttcaatccattcttttttctccattttatcaactccctcatatttcacagctttcgaaatataaggttcaataggctgataatgaagcaaaaattgcaccgcgcccaaaatgataagctgaatgcagaccaatttgaccagcagacgttcaaacgttttcatatacgcgcacctccattaggattagtatggaaaagtgcgctgctgtttattccgacagactgtttcttctctgctgaagctgcgcgcgcatacaatattggagtaaaagctgctgtgatgcaggatcgatttctgcaaattcaagcgtcattttttgtttatccgccttttcatcataaaaaatccgctgggtaacagcctcggccgtaatatcggctgtattttccttgccgggaagagaaaatgagacatacagcttttcacctggttccgcggaaatatgctcaggcatcacaacagcgattccgccggcgctgatattagaggaaaccgtttggaaagcggttttttccgcttccattttgacggatacatccaatactgcgtctgcacggacgtatcggcgtctttgaatccgcttcatttcctcctgaggggggatgtccaatccgatcatcgggatggggtcttttttctttcctttgattatgcttttaaattgatacggcacgtggccattccccataaattccgctgttatttccaatcctttatgcaaaaagaccgtccgtcccgaatccagatcgacaggatatgagatgtgcagttcgccgttttcaacgcttactgctttgctcctcgcttttttgggctcattgttctctatgtattcaatccaaatataatctccgacagctatcatgggccttcactctttcattatttatgcttttattaaagcatgtaacgaaaaaaaggaaaagacttttagtcctttcctcctttatttttataggtctttatatataggttctgcactttttaacttttctattttttcctcttttccgtcgtccgcattaatgaacatttgatacgtgtctttcccgatcgtcccaagcatttcgtagcaaagcacttcctgaccgagttcattcgtgatcagcgcctgccgcgtctcccgcacttcaacatttttattcagcttcgctttcgcttcatcagctgacaaagcgggagccggaatcgttctcgtgcggtgcgccgccaggtaatcacgcgcggaaaaaccgacgacttcaccatcatccagcgccactttcattcggatggcttccggataaatgcggacgtttttctccacggggataaaagaaaagacgccgatgttattatattgcgcgctttcatcaatttcgaggccttttgtttcatatccatttttctttaaaaacgcgacggcccggttagatgcttcattgaggctgatcttttgtttcttcacggcccgtttttgaatcaaatagaccggatgtccgcctttttgggtaatatccatatagataaaagacttgttgtccgcgtctttcatgcggatgctgtatacgtcccgattcgtcttcctgccgcttttgaccactttaattgaataattatgatcaggcgcaaaccgttgtgcgattttgaccgcttctttttccgtaatttgttttcctttcagatgcgtaaaaccttttcgttctgtatttgctcccgtaaatgtggggctgatgctgtcttcagaaaaagcgcctacatttttttcgactgttttaaagctgtcgacgatcgtattatcgctttgttttttgtcagaggcgagcgccatctcaacatccatccaccgtaaatttttgctcatgacgagatgctgaacgctgcggagctggttttgaatgttctccgcctgtttgtacaggctgttcagtgttgtatattctttcttatcaagcggtttttgatctaaatcccggacggatgttttatagctgaaatctcctatgttggataaaaactcctccgtcttattaaaaggcatgagagtcagcggcagctggctcacattgttatgtgcttcagatgtaattctccatacatcaatgagcgccggagacagagattttttactgttcattgcaagcgtcgtcccgattttgtcgtgaagctgatcaacatggtacgtcaattcatgaaaagccctctgataattattttccgcatgcagaaggaccgcatctttttcctgatgctctttatatccccagtatccggttgcggcgatcgcgacaccgagaacagcgataatgattcctctaatcatgttaacacctcattttgcgtacttttactcacagaaaatgtgttttccgattctttttatctgcggacgtccccaaatccatttgcttgtcgccgtatcaggattgaaataataaatcgcgttttcagaaggatcccagccgttgatcgcatcaagaaccgcttcttttgctctttcattcggctgcatatatatttggccgtcggcaacggcggtaaacgcgagcggttcgaaaatgacgccggccaccgtattcggaaataacgggcttttaatacggtttaaaataaccgcggcgatggcaacctgcccttcaaacggctcaccgcgtgcttccccgtacacagcctgtgccagaagattgatgtcgttgtttgagaaaccgccaggcatattggccgctgtcgtattttgcttttgatttgactgaccgcctgttttgttttgcggcttttgagcaggcttattcgttcccgccggcttctgcgttccggctctcggttttgtttggttttccaatgggacgttgccataatgagtgaacgtattccctttttggatctgctccattacatattcacggtaatattttgatttagaaatcagcacctgtttggttttcgcgccgacgaggccgtcaaccggcttcatgccgaatttctcctgaaaatttctcacggcccagtatgtggtccagccgtaaacaccatcgattttcccgttataaaatccgttatattgaagacgggcctgcaattctataacatcatcacccgtcgcgcctctttgaatcacttgatttgaaaacgcatgaaccgtttcatgatgatcgaagaaagcggcggcgaaagaaaatagaatgagacatgccataaaggctcctttgcacttcatctcttcaagcctcctactgcaaaatttaaagtgtacccgtattgtctgtcacgaggttatttttatgcacgtttccttcttatcccctgtcaaggcataaaaaagaaaccgcacgcgacgcgcggtttcttcacacttggatcatattgacggagcgtgctttttttgcctttcgcagcccgaaccaccataaaaacagcataaacggcagcatataatatacccaatgattgagggcggtaagaataaaatcgtaagaaccgtgcagacatgaaggcacggccagcgaaatcacaagccatttgacacgggcttttttctgcgaaaagcgggcttttccgagataaaatcccataatcactccgatcagcgcatggcaggagaccggcagaagcgccctgatgaaagcatgctcaacgccgtggccaaatagatacagaatattttcaagcgtggcaaatcctaaagacacactggccccgtaaacgattccgtcataatgctcatcaaaatgagcatgcggatacacactgatcatcagaacgaaccatttcaccgattcttccagaaatcccgaagacaaaaacgaaacgaaaaagcttcctccccccacatgctctttttcaagaacatattggataaacatggtcggaaacacaaggacaaccccgagaaaaaaagacctcagcaccatatgtacgggttcattgtcatactgatcttttaaataaaaatagcttaacagcgcaatgccgggagcaattcctgcagagatgattgcaaacatcaggcaacctctttcctttatattcctatatctatcgtaccatgttgttcacatttttacatctttcaatttttttaaaaaagagcatatgaatgatcatatgctctctgcacccagccgttttgatatttcatttgcgatcaagccgccgtgaaaacggccgttctcgataaaaatttcgttggcgttatttccagccgcaatgactccggcgataaaaacaccgtcaacatttgtttccatcgtttcttcccggaaaaacggccggcctgattccgcatcaatccgcacaccgattttttcgaggaaaccgtgatcgggatggtatcccgtcatggcaaatacgaaatcgtttttcagccggaccgtctcatttcggccggagcggaaaatgatttcatcttccgtcacttcttcaagacaagcgccgaattccatccggattgtgccgtttctgacgagggcctcaaactcaggcagaatccacggcttgatgctcggggagtactcatgtcctctgtagagcaccgtgacgcgcgcaccggacttcaccagttccaaagccgcgtccacacttgagtttttcccgccgatcacagcaacatctttatcaaaataaggatggccttctttaaagtaatgaaataccttaggaagcccttcacccggtatgttcatataattcggatgatcataatatcctgtcgcaatgatacaaaacggagtgaggtagcggtcttttgatgtttctacaagaaaacggccgtcttcctgtttcgttacgcgctccaccgtttcaaaggcgtttacgcgcagctcttttcttctgacaacctctctgtagtaagagagagcctgtatgcggaccggttttctgttttccgtaataaaggcgacatcgccgatctccaatttttcacttgaactgaaaaaagtttggtgggtcggatagttataaatgctgtttacgacattccctttttcgatcacaagcgcgttcacgccaatttgcttcagatgtatagccgccgataatccgcaaggacctccgcctattataattgctttttcttctgtcatgtccttcaactcctgcgattggcatttccatcataagtttccactcatataaaaaatctcctatattatcataggagattttttttgtttatgcaaacgattggtttatatccagcctctgaaacgcgaagcctccgccattttccgcacgccgaccatgtaagccgcaagcctcatgtcaatccggcggttttgggacatttcataaatattattaaacgattttatcatcatattttccagtttttcctcgacttcttcttcactccagtagaagccttggttgttttgaacccattcgaaataagaaaccgttacaccgccggcgctcgccagaacatcgggaaccagcagcgttcctttgtctgtcaggattttcgttccttccagtgtcgtcggtccgtttgccgcttctacaacgattttcgctttgatgcggtcagcgttctcttctgtaatttggttttcgatcgccgccgggacaagtatatcacagtccagctcaagcagctcctgattcgtaatggtgtcattgaaaagcttcgtcaccgttccgaagctgtctctgcggtcaagcaggtaatcaatatcaagaccgtccggatcgtaaaggcctccgtacgcgtcagaaattccgacaactttcgcgccggcgtcatgcataaacttggccagatagctgcccgcgtttccgaaaccttgtacgacgacgcgcgcgttctgaatatcgagaccttttttcttggccgcttcttttatgcagatggtgacgccttttgccgtcgctgattccctgccgtgggatccgccgagtacaagcggttttcccgtaataaagccgggtgagttaaattcatcaattcttgaatattcatccatcatccaagccataatctgtgagtttgtaaatacgtcaggtgccgggacgtctttagtcggtccgacaatctgactgattgctctgacatatcccctgctcagtctttcaagctctctgaatgacatatttctcggatcacaaacaattccgcctttaccaccgccataaggaagatcaataattccgcattttaaactcatccagatggaaagtgctttcacctctttttcagttacattcgggtgaaaacgaatgccgccttttgtcggacctacggaatcattgtgctgcgcacgatagcctgtaaatattttcacagacccgtcatccatccgaacaggaattttaaccgttaataatctgagcggctctttcagcagttcatacacttcttctggataccccaatttttccagagctttatgtattacggtttgggttgattttaatacatcatgtttgtcttcttcattatgaccggtgaatcgatcggctgccatttgagttaacctcctaaaatcttctgtttctctcatgctccctttcagtgactagtatacaccttcaatatctccgtgcatagaagaaagacaatgatttttccattatttcgcttaaaaaaagacggccgctgaaaacagctgccgtttcaaatcttttttatgaaaaatgtttctggatggtctccacagcattgccgtccatgatgagttttccgtactcatggagcctgtaaatcgtaatcgtcgccgggtgtccgtattcagccagcaccgcgatgacgccttcggcggatcgggagccgaggtcttcaaggcttacatagtattggttctcatagtggtagacggtgccgccggtaatcccgattcggtgaaggcttccggcaagctgaatgatatcttcaaacgaatggaactgataaataatatccgggctttcgtcaagtttgacctgcatctcgatataatcatcgtcatattcgtcatcttctgcgtccgcgtcatgatttttcgttacaatcacaaccatgccttgtgcctgaagagaatatacttccaccgcgatcggaccattcgcttcaaagccgagctctgtatttgcttcattcatcatatctttaaataactggtggactttaaacgagtccttccagaggtcttcttttgtcagtccccgatcagtcagatcgtcgagggttaaaaagattttaatcttattatagttcagacgctcaagccgcataatgttccctcctgcctcttcttgcacacaaatcatataacacagtatatgaataaatgagtcataggttcttaatttgttatcagtttacaccgtgtacagcgggaagacaagcagaatgccgttttttatcaccgcggccgggtttgtttcaggaagacggctcatccggtccgcacagcgtaatcatatgcgtctccggtttcgccccgagcctcagcggaacttttgtcgtcccgtagccgttgctgatcaggtaatgcgctttttttaccgttcccgtcccgcccaattcgtacggcccgaaccggccgaaacggatttggccgccatgcgtatggccgctgaacacagcgtcaatcccgtctgactccctcatctgctcatggatgtccgggttatggcaaagcaggaggtttactttgtcagcatccgtatatctgattgcagcatcgtaatcatccatcatcatcctgatatcatccacgccgcagatcgtaacggtttcccctttataagcaaactgaaccgattcatttctcagtgggatcactttgtatgcccgtaaaagagagagcagtttttgctggctgacctcgtaatcgttatttccccacacatacatgacaggcgcgagagccgtcagacgtttgatgttttcttcaattctggcgtaaggaactccgccctccgccatatcaccgccgagcaaaacggcatccggcttataacctgccgcttcgcggagaagcttttcatcaattaaacggcggtgcacgtcagatataaaaaagatggtgagcggcttcatccccttcattttatcaagcgtaaatgtatgtgttttcagatggctgccgtttgccgttttgtacataacggccgccataaccgcagccgctcccgccaatgagccgagaattcccgctgtaagcttcataaacgcactctccattctgtcattgtcttatattagacggacaaacaaaaaaagacgtttctatcctttccggaaaacgcctcattttatttgctttcaaaataaagattgatatcataccgatgtttcatcaagtgaaaaacagattctctcgccctccatttttcaggctggggccataaatccgtgcttttttggataatttcacatctcagtttatgaaattcaccctcagctttttcttccttttttttgaaataataagaagtgcaatacgcaaaagcggaagccataatccagcacaagtaaaccgtatggcctaatatttcctgcagaatcagctgcggagaggcttggggggcattaaagcttttaaacatcagcagtatgcacatcagggaaaaacaaacgagggacgcccactgccatcttcggcattgtgcggcataattttcgtattttaatttccgtttcaccagcgcctgaagcatttgtttcgtcggtccgtcagcaaatcggtctaattgcttccataaagaatccatgcgcttcacaccttgtccgttttcattggtacactatatgaaaaacgaggtgaaaacatgcatttattttaatcagacagcggaatgttcagaacctggccggtgtacacgtcgtttccgtttaatccgttgtagctgcggattttttcttcacccgcccggcttttatagtatttcattgaaatgcggtaaagcgtttctttcggctgtacagtatgctgtacggtccgcactttttttgggacagtcccggcttgatcactcgcctcagccggagccgctttttcacggacagccggcggagactgctgttttgtctccgcgtattcggtgtctgtcggctttacttgtttttctgagggcgtttccgtttttttaggtgttttttcacttggtttttctttcgttttttcaggtgcagccgcttctttcttatctttgtcgtcagacttttttttcggttgttctaaaagagcggtttctgacgtttctttctgagcgcctttcggaataacggcaggcgcgctttcactgtggtctataaagacatcttcatagtccttcgggtcaaatctgctgctgttcgtcatataaagaagaccgaaaaagacaccgattgttacgataatgaacaggacggtcagaaaagtgaacagcggcgtttttgttttggttttttccttcacctgctcttccttttttttacgctcctcttttacagattgtcttgtcgggaggctgtcttcaagatattcaatttgttcatccgcggccgcggcaacctgctgctcggcacgcagctgagcttttcttctttcaactcttgacatttccgtcatgcaaacccctcctaacatattgaaaacggatctgacaggcaaataccgcatcaataataaaatgcgctgtaaccggaacgaataaattgccggtccattcatagataagccccagcaaaagactgatgcccgcaaccatcataaacagaagccacttcgccaagtatctgaaatgaagcacggtaaaaatgaagctggcggcccataagccgatatgtgtctgcagaacgcctctgaacaaaatctcttcgctgaacgaaatgagaagcgtcaaaaacaaaatgtgcagaaccggcctgttcttaaaaagcaatacattaatgccgccgtcatcatataaatgcgaaggacaccatttcatcaccgccagatcggcaaaaatgacaaggacggcaagagttacaccgtaccatatgatattatcgtcacgtatatgccacagctttaaaaaatcgtgaatgtcggtaaaaaagaaaaagccgataatagctgaaaccgccaatatgagcaattgggtggcgtacagctgcatcacaatctcccggtctgagagctgccggatcaattcgctttgccgtctcagctgaactcacccgcagactctgatccgaaaatccggcctaattccagcttccaatcttcaaaccgttccatatttttacgttctcctttttgctcgtacggagccagatcaagtccgcagctgctgcagcattgtccggtttgaccatcaggctcatacggttcatcaaaataagacagcagcgcttctcttatacattctttccgctctaataacgccgaaaaacgattcattttacgcagcttcttttccacgcggtatgtcagttcttcctgcagttgctcttttgtggtttttccttgcagatacagatggacggccgttcgcgcctgtgtttcctggacgcccttattgatcagaacgtcccgaagctttcgttcatcacccgtaccggcatcccgtatgacggccagaatgccttccaggtcataatcagacaggctttctgtctgaataatctgctgctgaagctcggtatcgccgggcgccctcagcaaaatactgacactcgggctgccgtcgcgtcccgctctgccgatttcctgcataaaggcctcggccgtttggggaggataaaagtgaatgacaaagcggatatctgacttatccacacccatgccgaacgcattggtgcagcagatgcaatcaagctggttatggataaattgctgctggattaaaatcctgtcgcctgtatccattccgccgtgataataatccgtccgctttcccgttttttcgttcagctcagccgcaagctcttccgcccattttctggtcggacaatatatgatacccgggccttcaagcttttcggcaagctccgtgagcctgcttattttttcggcattatcagccaaatgttctgccgccaggagaatattcggccggttgactgaataaagatgacgcaccgcatgctcaagtccgagcacatccgtcacgtctctgagcgtttcttttgtcgctgttgcggtcagcgccaatacaggcggctttccgagtgcctgcctgaaaggtccgagcttcgaataatcaggcctgaaatcatgtccccattctgatatgcaatgagcctcatcaataacaaataaactgaccgagacatttttcaaacggttcagcacataaggtgaagaaagggcttcaggagacatatagagaaatttataacggctgatgttgctgaggataaaatgccgctctgcggaattcagcatgctgtttaatgcagcaacccgcttttctcctttcgctttcagctgctgcacctgatcttccattaatgaaaggagcggcgaaataatcagcaccagcccgtccatcatgtaacccgggagctgatagcataatgattttcccccgccggtcggaagcatggcgatcgtatcttttttttggagcacgctagtcataatctcttcctgcccttttttaaaggaatgcaaaccaaaatacctggataaagctttatgcagctcagtcatgctgattcaccgtctttgccagcgccagcctgatctgaaaatagctgaagcgcatctgcattccttcgcgaatccgtttaattttattcgtttgatgctgttttgcaaatgccgttatcatacgctgttcctcttcagaaagatactgttctataaaaaatgcaggctgatgcaatgatatttctacgatatgatcttcgattgtggcggtttttaaatttctgaccgcggcgatccgttcaatcggaaaccctttttccaacagctcaaaggtttttctggcagactgtgtcagcgcgctttccgcctgcagatcggacaacagctcacgcagagcgggatatgcacattgcggaagcgattgaataacataatgtaccgctccccaaaactggacggacacataccattcatcttcgttcagctggagagcaagctgcttattcgttttgccgattctgttgaatgaagttaaagaatagacaaaaataagcgcctgccgttcacttacgccttgcagaaggtgaaacagcgtctcatgcatttggacggaaagctctttagcatctctgtttttccgcatgaaccgtttgacccatctcagcgtctgcacatcgtttgtaaccgggatatattgactgcattgatgctctttgtttgacaggacttgaatgagcagggaaagccgcctccacagggtaacggcaggcgtttgataattcgcgccgtggcagtgcttcggccaaggccgctcggcaaacgcccgttcaagcctttgaacgccgcgcgcagtcactttccacgttccctcttcttttccggctgtaatgtatgagttctcggtgagtttatgcaaagaagccgcaatatcgccgcgttcacaatgtgaagccatgccgaaatatttagcgatctgaaataagccggcatcctgaatggtttgagacgacttttttccttttaataaatgaaacacagcactcggagtccgttcgccgtctattttgtccagacagtcgagaaccacggtatcaaagtagtttatcgccaatctaaacacacctacatttcttctgtgacaagtttcgttttttggttctttttattttaacagattttcatataaatttgacgtttaaagtcatcttttagggggaagtgctaaagagaatcccttatgtgataagcattctcaatcatttttctgttgaaatttgacactaacatcattacaataagtaagaggaataggtgttatatttgaaaatatataaggtaaaccatttgttccaacacgaacaatctgggaggttttattcatggcaaagtacacaattgtagataaagatacgtgtattgcatgcggcgcctgcggagctgcggcaccagacatttatgattatgatgatgaaggcattgcgttcgttacgcttgacgaaaataaaggcgtcgtcgaagttccggaagttctggaagaagatatgattgacgcatttgaaggatgccctactgattcaatcaaagttgcggatgaaccgttcgaaggcgacccgctgaaatacgaataaaaaagccctccccgtgagaggagctttttcgtcctgaataagactccggctgttattggccggagtcttatttttttgcgtgatcaaacaatcaaaaaagcgcccggtctgtgttttacagagcgggcgctttgaagtggttattgtgtctggatgctgcgtttttgttcaatccaaggtttcagcttcgtaaagatgaacgtaaagacgatggtgatgataacgccttttacaatgttaaacggcaggattcctgcgacaaccgccgtttttaactggctgtttgacagtaccggtgaatgtaaaaaccaagtatacgcgggcaggataagaatatagttcaaaatactcatcaatacagtcatcgctgcggttccggccagcaggctcactgcaagtcctttagcagatttgagctttttaaacataaacgccgtcggcagaataaacagcgttcctgcgataaaattggctgcctgcccgacaggcacgccggccatgcttccttgaatgatatactgcagaatatttttaatcgcttcaaccgcaatccccgccgcaggcccgtaaaccaaaatggcgataattgcaggaacgtcactgaaatcaattttcaagtaatccggcagccccggaaacgggaaatttaacagcataagcacaaaagcaatactgctaagcatactgatgacaactaatttttttactttcacaatgctctctccttttcgatcaaatctctcgaaaagaggaaaggttcttttgcgccccaataaaaaaaccgcttttgttaaaaagcgggagcttactaaggcttggcaaagaaacgtttgatataagcatcaaaacgtctgctgaacctccatcttctcccatccagactatactgtcggctccggaatctcaccggatcctgccgccgaagcagctcgcgggcttagagcatgatgctcatcaccgccggtagggaatttcaccctgccccgaagattgatcttatgaatttattcacattatatatgatcaaattgcaattgtatagagaactgctcaaatttaaataaaatattggggaagcccaatttaagctgattcagcggtttccttttctcctttactgcgtcaatacacattgacactctattgagaatatgataaattatcagatatttagtcagctaaactaggaggaaatctaacaatgtttcgagttttggtctcagataagatgagcaatgacggcttaaagccgctgatggaatcagactttatagaaattgttcaaaaaaacgtcgcggatgcagaagatgaattacatacctttgatgccctgttagtccgcagtgccacgaaagtaaccgaagaattgtataaaaaaatgacctctttaaaaatcgtcggcagagccggtgtcggcgtagacaacatcgacattgatgaggccacaaaacatggggttatcgtgataaacgcgccgaatggaaacaccatttcaacggcagagcatacattcgcgatgatttcttcattaatgagacacattccgcaagccaatatctcagtaaaatcaagagaatggaaccggacggcttttgtcggggcggagctctacggaaagactttaggcattgtcggtctgggccggatcggaagcgagattgcccagcgcgccagagcgttcggtatgacggttcatgtattcgatcctttcttaaccgaagagagagccggcaaaatcggcgtaaacagccggacattcgaagaagtgcttgaaagcgcggatatcattaccgtccacacgcctttaacaaaggaaacaaaaggactgcttaacagagaaaccattgccaaaacgaaaaaaggcgtccgtcttatcaactgcgcaagaggcggcattattgatgaagcggcgcttttggaagcgctggaaagcggccatgtcgcaggcgctgcccttgacgtgtttgaagtggaaccgccagttgaatcaaagcttcccgaccatccgctggtgatcgccacacctcacttaggcgcttcaacgaaagaagcacagctgaatgtcgctgcacaggtttctgaagaagtgctgcagtttgcaaaaggtctgcctgtcatgtcagcgatcaacctgcctgcgatgacgaaagatgaattcaaaaaaatccagccttatcaccaaattgccgataaaatcggaagtctcgtgtcacaatgtatgaaggaacccgtcaaagatgttgcgattcaatatgaaggcaccatcgccaaacttgaaacatcatttattacaaaaagcctgctgtccggtttcttaaaaccgcgtgtagactcaacggtcaatgaagtgaacgccggcggtgtagcaaaagaacgcggaatcagcttcagcgagaagatttcctccaatgaatcaggatatgataactgcatcagcgtaaaagtaaccggagaccggagcacatttacgttaacggctacgtatatccctcacttcggtgaacgaatcgttgagctgaacggctttaatattgacttaaatcctgccggccacctcgtttatatccagcaccaggatacgactggtgtaatcggacgcgtcggacgcatcctcggcgataacgatatcaatatcgctaccatgcaggtaggccgtaaagaaaaaggcggagaagccattatgatgctttcttttgataaacatttagatgataaagtcgtcaatgagctgacttcaattcaggatattgtttccgttaaactgattgaccttccgtaatcaacaaaaaacccaaaacattcatatgttttgggttttattacgtttaatggcttggaagcggattaggcgcggcaggcacagcgataggttttgtcacatcataattaccgattttctttgtatgcgcatgtgtgaacagcacctcagaataaccgaattccttcgcagttaacagaagtccttcgatcattaaaatcccttccagcgaatcttcaaccttatgtttttcggacaattgaatccgcagctgctcgccgtcttccctttccgataccgatgcaatcgcatctgcttctataatgctcgcagtctgtgagcctccgtctgttgtcttcatcccgtcaatagcctgatatactgaataataggtttgttcagacgggacgagatactcttgtcccagactgtcgctgtaagaaaaatacgcccggtttgtctgtttatgtacggacatctcagcggaaatgccgtaagatttataaaaatcctgtccggctccgttttgaacctttttcaatttaatccgctcgtaaggactccatgtcaaagtctctttcagcatctttttcaataagtcagcatcggcagctgattcgatagaaagccgtccgtttacctgcacaagcaaatccttcttatccgccgttacctgcacaccttccaaaaggttcggcacagacaggaaggattcgggcacttctaggtcttccgcttcggataaagcctctgataccgattcatccggcttctttttttcaaaactgaccggtatgacggcggatgtttctgaatcggcaaatgccaaagtaatgtaattgtttttgttttggtttgagacgacgaacgtcttctgatccggcggcttgacagaagctgactgactggctttttctgtctggcggctgtcagcggtaagatcaccggaagatttgtttgtcatcaggtgaggagatataatcagagcgatgcacaatgcgcagacgccggctgcggcggggccgatccagcttcgggccggttttttcctgtacggtttacccgtttcaatattccggtaaatggcctcgggtgaacgatgatctctaaccgccggaagttgtcttaacaactcctctactctttcttcgttccaatatgacttcatcatccattagctcctccctcaaaagctccatctgtttccgaagtattttgagccctctgtgttgggtcgttttgactttgctttccgagaagcggagagcggcggctgtttcctgaatggaatatccctgaataaatctcaagataataacagctctttgatcaatggtgcaatgatcaagcgcggtataaatttcccggacgttttcatgctgtacggcgagttcgtccggaagcaaatgctgatctctgacatcttgtgtatcccaatcaaacgtacccataatacgctgtctgatcgtctgctgcttgcggaaccagtcaatcgccacatggcgtgcgatggacaacagccatgttttttcactgcttcttccttcaaatgtatgataggaattcaagacgcggatatacacttcctgcgtcaaatcttcagcctgcgacttatcttttaccatataaaataaaaattgatataaatcttgatggtatgcatcatataatatctgaaaggtttcttccatgggaaacccctccgttcacttttttgtcgtaaaaatgcgttgaaaagttacattacaactatattacgagaaactggaatttggaagggaatttatattaacatattcttaaatttttaaaggagaaacaaataaaaaacacccgcagaacatgcgggtgtttcgtatggaacaagattgttcgtcaatttcagacgtcatcctgcgcttttgtcggaatataaaatgtaaacgtcgtccctttgtcgatgctgctgtgaaccgcaattgagccgccgtgggcttccacgatattttttacgatggcgagtccgagtccggttcccgccctgcctcttgttcttgctttgtccgctttataaaaacgttcaaaaataaaaggcagatcctcttccggtattcccgagccggaatctttgatatcgattttcagtccgtcttttacggtctgagccgcgatatgaacgcttccgcctgactccgtatggcgcagcgcattatctataaggttggtaaacacctgttccattttgtcttcatcaaagacacactccggctgagacactgagatgtcctctgtgagcgaaacacctttttccttcgctaccccggaaaatttgcgggagatcttctccagaaattcatgcaggtttaccgtttcatagtgcaggcccgtatgtccggattccattctggccaaatccagcaaatcattgacgagccggcccatgcgaagagattcatcataaatgatttgcgcgatttcttttttctcctcttcggtgcttgcaatgtcgtccactattgcttcgctgtatccctgcagcatagaaatcggggttctgagctcatgactgacattggcaatgaagtcttcacgcaatttatccagcctgcgctcttcggtcatatcacggagcacggccacggcgccgcggacgtgtgattccgcataaagaggcgacatcaataaaacccatgaccttccttgaagcgtcatttcaatcatttgctctttttccgtgttcactgcattttgaaatagctcttttgcttcagggggaaggttgtctccttctttaatgttcatgttctgctcataataccatgcctgcagaaaacgttcggccggcgggttggtcaccaaaatggtgccgtcgatattaatggtgatgaccccgtctgccatactgcttaaaatattggacagctgttctttttcctgattcagcgcgttaatatggaaattgagctgccgtcccatctgattaaaggcaatggccagttccccgatttcatcttgggtcagaatcggaatttttgtatcaaactttcctttcgccaagtcttgggcgccttcccgcattttccgaaggggatatgtcaccctgctggataaaaagaacgcgaaaaacgttgtcaagacgatggcaatgcccgccgcaagaaaaatatagcgtgtcgtatgtttcgtcgtatctttgacggcaagcagcgattgggataaaaaaaccatgccttttttgccgtctttttcatacggcactccgacgatcagccgttcgttatccgaaccggcattgttggggaccgcgcgtttgcttacttttttgcggtctgtcagcgccttgtgcagatcccggtcatgtttgatctgctctaatgtaatagaggataaatgattatcgtcattgggcgaataccagacatgcttatcatcctgaatgatcgcgatgctcgttaaattgtccgccagttcccacgtgatggatctggcaagcggctggtcttcatgattttctattatgaccgcaattttatcggcaagctgcgttaaatctttttccgcttcttcaacgtggtaattttctataaattccagaagcagcaccgttaaaataaataaaacaattaacacgagtgaaagaatggtaaaccaaagctttcctactacgcttttccaaaacttcattcagcgcctacctcaaatttgtatccgactccccatacggtgacgatttttttcgccgctcccggggacactttatttaatttttcacggagccgtttgacatgggtgtccaccgttctgaggtctccgaaaaattcatactgccacacttcttttaaaagcttttccctgtcgtacactttgtccggtgttttcgccaggaagtacagcagttcatattccttcggcgtcaggctcacctccgtgccgtccgcagtcaccctgtgagcatcgtgatcaatggatagatgcgaaaagacgagcacattttttgtcggggtattggctgtcagataagatgtttgggaagcccttcttaaaagcgcctttacccgaagcaccacttctctcggactgaaaggcttgacgatataatcgtccgtacccgcttcaaacccctggacgcggttggcttcttccccttttgccgtcagcatgataatcggcgtcgcttttttttctctgagctgccggcatacttcgattccgtccgttcccggcatcattaaatccaagagcaccagatcataatctgatgccagccccattttaatggcctcgtcgccgttttccgcttcttcaatcacatagttttcccgttcaaggtacattcttaaaaggcgtcgaattctggcttcatcatctactactaatattttagtttcatttgtttgatccatcgttttccccctgctttccttctgttactttcattttaacaaactgtgcggcagcttgagaactgtatcggctatttgcatctatgcgtacgaatgaagtccggcaagcacgagattcacaaaaatcaagttaaacataataatggcgaagccgatgacggcaagccacgcggacttttcgccatgccagcctcttgacagccgcaagtgcaaatacgctgcgtaaaataaaaaggtgatcagcgcccatacttccttcgggtcccagccccaaaaacgcgtccatgcaagctgcgcccaaatcatcgcaaacacaagcgcgccgagtgtgaataccggaaaaccgatggaaacagcgcggtagccgacttcatcgaccaagtccagattcacatttttgacgagcgggctgataagagcgctgattctctttctgaatatcagcctgagcgcaccgtataaaacgagacctgcgccaaacgaccagatcaccgtattgacctttctgcctgaaaaaatggccggaagctcaataagcggcttcattgcgccttccgtaagcagttctccctcatgcgggccgacaagcgcaggcatatcatatatcatgacgcttttggcttcttttttatccacccaattaaattcagctttgtagtccgccagccggaatgccgacgtgacggcaataaatgccacggtcgtcacgagtataaacatgatgacttcaagccagaacgtttttttccccggtctggattggtcgacatgctttaacaggaaaatgacgccggctacaaaactgatcgcaagaatcgcctgcccgagcgccgccgtcgtgacgtgaatgtacagccaattgctctgcagtgacggaataagcggcgtaatgtctgtcggaaacatgcttgcatatgcgataagcaaaagcgcgatagacaatgtgaacatgcctaatgaaggcagtctgtaaataaagtaaataataataaaagcgagaacaagcatcatgccgaatgacgtcgtaaattcaaacatattgctgacaggcgcatgtccgcttgccgaccatctcgcaatgaagtagccgagatgacaaagaaatccgaaaatggttaacgtgattccgatagccgaccagcggcccttaccgtccttagcaccttttgttccccggatggcgccgccgaaaaccgggacggcaattaaataaatcaaaaaggcagcataaagaaaatttgcgctcagctccgccatgacaccactcctttttcactaggcctgatttttggccaattctttttgatcggccggctcttgaatcccggtcccgctaagaacaaattcgatatcctttttcagaccgaaccagtttttgttcgtatgtcccgccacaagcacttcatgatcacctgttttgatccagatccttctgtgctgccagtacattccttgaatgacgccgatcataaagatcgcgccgccgacggcaagcacccataaggttaaatcttttctgacggtgagtcctgtaatgtttttcgtttccacatggtcgaattttaatttgtacttgttactttcggaaccttcaacagtctgctgaatcgcaacaaaacttttctcccctttcggcttgtcaggagccgtgattttaaagacaaaagccggattgttaggaaccttcgttttcgtgctcggttctccgtccttgttaaaataaaaatcaggaagataactggcgatctgcactttgtaaccgttaccaagatcatagtccgtgtcgggatcaagaagattgatcttcagtttgccgaatgactgttttgttttttggtcgatcagctgaaataccatctgatcgagctggttttctttatagtccacctgatatacagaataggagtcaaagcgcagcggttcattgacgcggatattgttttctttgactcttttaagcttcggcttttcaccgaatacaatgtcgcctttcctcttgtacaaaaccgcgtccgttgtgaaggatttggcgactttgccgtttccggctctgtcaatggcgtcggcgaatacttttttctcagtgtctttgttatatgtctgcatcgtgaaccggttgttttttaagtaatatttgccgtcagtacctgggatctgggcggtttcgccttcacggacccagagcgtttcatcgacatacataccgggtacaaatctcagcatggctccgatcagaaaaatgatcaggccgatatgattgacgtagggcccccaccttgaaaaacggcctttttccgccagaatgctgccctcttgttctcgcactctataatgcttttttttcaatcgtgttctgaggctatcagccgcatccccgctcagctcggtttctgtccggctgtatagacgctgcctcttcaaaaagaccggattccgccgaactccttgatttttcagcgccctgtacaaaggaatcacccggtccaggctgcagatgaccagtgatatgccaatagatgcgatcaggagcatataccaccatgagccgtacaggtgatgaaatcccaacagataatacatttggccgattatgccgtactgctgttcataatatgtatccggctgggcgcccggcggcagataagcttcctgcggaaaaaccgtgccgaaagcagacgccgccagagtaatgacgatcagccatattccgacttttacggaagaaaagaagttccataccttatctacgattgttttgttatatgtttgcgaacgccttgcgctgccgtcgtaccgcatatcggcaagcggcgatttttgatcatcaagcggcttcccgcacgactcgcacaaaaccgtcccggctggattcacgtgcccgcattcacatttgacctttttcatgaagacgcctccggcttaattaaattcatatagtcatgaaccatgcgttctgtcatcgtgccggtcaccactttcacgacttttccgtcgggattgatcaaaaatgtcgtcggaataggtgatacgccgtacgcgtccagcacttgccggtcagtatcgagcgcaaccgggaaattgacgccgtatgttttcataaaattatgtactgcaatttttgattcgccgacatttaccgcaaccacctcgacaccgaggtctttaaaatgcttgtattgattctccatgtagggaaattcctgcttgcacggctcacaccacgttccccagaaattcagaaaaacaccttttccttttaactgactcagttctatgagtctgccctctgtatctttcagcgcgaaattcggggctttggacccctcagatatacgctcaccgtttgtgtatacggcattatagatggtatatccgagcgcgcagagtaagatgagaaggatgccggtccgaatgaataaacgccgccgttttttgttcattgtacactgctcccctcccctgcctgcaaatccattcaattatatcatcaacacgttttgtaatttttgaaggttatgtgaaaattagaaagcgtttttaccgtgttcagctaaagcccgcagccttttcacctcatgcggcgacaattctcttgcgtctcctgtgcgcaggcctcttaaatctaaaaatgcgtattcttcacgttttagtttcagcacgtcatgaccgatcgcctcgaacatgcggcggacctgtctgttccggccttcatgaatcgtcagctgaatgatgctcgtctgctttcttttgtccagggaaagcattttcgctctggccggcgccgtcttgccttcttcaagctgaatgccgcgctcaagctttctcagaagttccttggaaggaatccccttcactttggcgacgtacgtcttatcaatttcgtatttcggatgcatgagtttgttggcaaactcgccgtcatttgtcagcaataaaagtccgctcgtatcataatcaagcctgccgatcggataaatgcgctgcggcacttctttgaagaagtcggtcaccactttccgccctttgtcgtcatcagctgctgagatcactcctctcggtttataaagcagaaagtacacgggttcttcccgctccacctttaatccgtttacttcaatctgatcagaaccggtcacttttacgccgagctctgttattacttttccattcacctttacttttccttcttttatcagctcttctgcctttctgcgtgatgccacgccggcatgagcaataactttttgcagtctttccatgtcgttcacctcaagtataatcttacttttttccccttgaacaaacaagctttttcaaggagagttattctgatatataaaaagcgcctgatttcaggcgcttccaaataataacgtaactatgatgattgatgcaaccaccccgatcaaatcagcaagaagaccaacctttaaagcatcccccatttttttgatgccgaccgccccgaaatacaccgtcaggacatacagcgtcgtgtcagtcgatccctgcatgaccgaggccagtctgccgataaatgaatcaggcccgtacacggcgatcagatcagtcgtcatgccgagcgccgccgtccccgaaatcgggcggatcagagcaagcggcacgacttctgcgggaatgccgagcgttgtaaagaaaggcttgcacagccccatgacaaaatccagcgcgcccgaggtccggaatacggtaatcgccaccagcatcccgaccaaatacggaatgatggaaaacgcaatctcaattccttcttttccgccttcaacgaatgattcatacgtcggcacttttttgatcgtgccgtatatcaatataccggcgataataatcggaatcatggctaaagacagccaattcaccatttccattcgcttacctcccttttcttttgcggcggtaccagaagtagcggtcaatgaaaatcgcgccgattcccgaaattaaagtcgctaagatggtcggcccgacgatatcggtcggtgatttcgccgagtaagccatgcgcacggcaatgacggttgtcggtatcaatgtaatactcgaagtatttaccgccaaaaaggtaatcatggaacggctggcctcagacttacctccattcagctttttcatctgctccatggctttaatgccgagcggtgtcgccgcatttcccagtccgaaaaagtttgccatgagatttgataaaatgtatcccatcgccggatgatcagggggaatatcgggaaacagcttagaaataaacgggcggcacattctgctgaatatatccaaaaggccggactgctcggctattttcatcaggccgagccagaacacgagaacgctcattaatccgaacgagatcgtaaccgcttctttcgctcctttaaaaacggcttcattcacatcctgcaaggtaccgttaaacatcgcaaagacaagtccgattaccgtcagacatacccagattaaattgaccatgacgaaccgcccgccgcgctcataaacaggctcgtaaacgtctcaatgaaatgctttttcggttttttatggcgctcattttcataatagacggggatcttggcgatcactttcccatcatgcataacagtcatccggccgacgacatcaggaatgagagaggcgtcctttttccaggcttttttcggttttattaaggttgtgcggatttttacatcgtcgatttcatcctcttttaacaaatatttgacatcccgggcaataaaagcgcgctttccgtaaaacgtctttttcagcttcgggatgccgccttttttagcgacgacataggttttatagtgctcaaagacataattaaacatattcatatgatcatcccaatcatccggatcatttatggtgaccgcgatgagatccgttccgtcttttgaggccgtcgagacgagcgtccgtttcgcgatttttgtgtaacctgtttttccgcctgtgctgtaacggtagagcccggtcagaagcttgtttttatttttccatacccggtccatcgtttccgccttatacacttttgtgcctgaaacggtccggtattccttgattttcatcgcgtatttagtcaaaagcgccatgtcatacgccgttgaatataaattttcatggtcgtccagcccgtgcggattttgaaattttgtattttccatcccgatttgctcggcttttttgttcatcataaatacaaaaccgtcaaggcttccgccgacatattccgctattgccgcagcggcgtcatttcctgaccttaacataagcccgtatacgagatctttcagctttactttttgtcccggctgaagataaatggctgagccttccgtttttacggcattcggggaaaccgtcacggtctcttccatctttcctgattcaatcgccagcaccgccgtcatgattttcgtaatgcttgcaatccgccgcttatgatgttcatccttggcgaataacaccctgccagatgctccgtcgattataatcgcgctttttgcgctgacatgtatttgggcatgtgccgtattgccgtctgtaatggaaaaaagaataacaaaagtcaaaagaaatacggcagcttttttgagaaagcgcatgaatgctcacgtccttgttgtgggtttgtacaagtttatgcgcatgtccatgacttatgaataccaattgcatcactttcacataaaaaaaactctcccaaaaggaagagtttttatctgactgatgccatatttgagcctgatgcttcatattgcgccaattcttcccgcatgcgcagaaattcactgctgagcgaaagcagaaggctccgcagcgagtccggcacttgctggtagaattcaatcgcgctttggcctgtataagcggcgcggctgttttcgtaccatgtatcctttttcggcatgaaaaactcttccacgcactgatgatatactttatacagcgttttttccgctctcgcctcatgaaacggctcctgcattaaaagccgcctgcaggcttcctgggcgccttcgcaaaagacggtcatcctcctcagcacactgagcacgtcgcggcagtatgcctcatccgcctctccttgagcccgcatctccggcaaagttgtatgatttaaatagctgctgaccatcgtgacaacctcggctaaaaattcaccagtttcttcagtatgggccctcacaatcgaatttcccatttccgtccgtttccttcctctcttgtacgtcgtcatttgcgtcattcatcaatggcctttccctactatcgtatgatgaaaaacgattattatttaatatcctcaaaagtttggttgaagttttcaaagaataaatcggcttcctcctggagaacgtcttcctccgcattttcaggaagcggcgggagctcctccaatgtttttaagccgaattgttcaagaaataccggtgtcgtgccgtataaaatcgcccggccgggaccgtcggcgcggcccacctcacacagcagcgcttttgacacgaggctgtgcagaatccgctcagacttcacgccccggatatcttcaatttccgcccgtgtgatcggctgcttgtacgaaacgatcgccagcacttccaaagaagcctgtgacagcccttttgacggcacttcgattagttttttcaaataaggcacgaattcttttttcgttccaagcatatacgtatccgcatattcggtaagctcgatgcctctgtcgtcttccttgtactgagcggccacttcttccatgattccggccagttccgcttcttctatttcaagcaccgtcaccaattgctttttggtcagcccttcatcacccgccgcatacagcagggcttccacaatcgctttccaattcacgatatcaagcgccatgaatggattcactccccgtaatgtatatatctgaaaagttttcttcctgttcaatgataatctgctgatttttcatcagttccaggactgctaaaaacgtcacgacgagatggtccttttgccgagaaggaaaaagctccgtgaagtttaatcttctccccgccgtttttaagctttttacgatttcgttcattctgtcttcaatcggtatttcctgccttgtaatggtcgtttctttcggccgcgtgatttttttacgctgaagcaccttttgaaacgcgccgatcatgtcataaacggtcaccgacagcttctgctccgtctgtttgatttcttttgcatactcacttaaatcactcggcggctttgtaaatgacttttgtctttcttcttcccgctcttttaaatccttcgcagcggttttatactttctatactcaatcagcttttcaatcagctcgtcccgagggtcttcttcttcaagcatttcgtcttcaaacagctcttcctcttgtttcggaagcagcattctgcttttaatgctgagaagcgtcgccgccatgaccagatattcactggcgacatcaagttcaagctcttgcattgtatgtacatataataaatattgttcagtaatggttgccacgggtatgtcgtatatgtcgatttcaagacggttaatcagatgaagcagcaggtccaatgggccttcaaacgtatcaattttcacttgatattctaccattatctcaccattttcaatatcactctcattgccggaaaaactggctaccctttagtataatccaccgaaatgctctcgtccaatacttttatacacgtcctccgttatttagaaaatactgaaaaagaagatatacgcctatacctttaaaggcggatgcacatatgatagccgtgtaaacttgaaacaaagggaggctgatttcacatgagcggagcttgtttcggcggaggttttgcattaattgtcgttctgtttattttgctcgttgtcgtaggagcatcttacatctgctagttcctcaggcttcagacaccaagccgctcttttttccttttcatagcgctgtggtacactggttttagcataaaaggaggaagcggcttgtatcctaaagcttatatcggctttttggccgaatttcacgcatcaagagattattttgagtgtcatgaactgttagaggaatattggaaagaaagcccggctgaaaagcggagcattcattgggtcggcctgattcagcttgccgtcgctctgtatcaccagcgcaggggaaatgaagccggggcgaaacggctgattgccaacagcttacgtattctccggtctgaaaagcaggcggtctgttctctcggtctcagccacccgaagctgattgagctgatagaaacgctgtcagacgatatagaagcgggcctgccttacagaagtgttatgctgccgattacagatgaagccctgaaagaagcatgtcttgccgaatgccgccgaaagggctatacatgggggcaagacggcgtatcagatacctttcttattcataaacaccgcctgcgggacaggacggatgtcattaaggaacgcgaacgggaaattgagagaagaaaaaaaagcagaggctgacggtcagccctgctttttctatatcaaaacagctcccgaaaccgtgaagattccgggagcatttgtcagttattatatgagatatcctgatctttttgatgttgacagcgttcaaaaaagctttgcgttaattcattcggaacgagtgcctccgttttgaacagacgttttaaggcgtccatcatttgctttccgattccttgatggcggtgagaaggattcacgctgatatgccggatttcaacttctgagtcctttttttcgactccgatcgctccgacgatatcttcatcctctttccaaagaaagagctggcggccagtatccgtttcatagtcctttattgtctgctgaagctgcttgagatctttttcattcggcataaatgacagaagacccatcgcaatcttttcaaacgattttttataacgaattaacataaaaacccctctatatccaaaatgtccattcatgtcctatcaaacggatacataaaggcgatccgtttcctcacattatatcattttcaccgctgttttaaacgcttttcaacaaattattcaaatgaacggtttaaatttgccatttcaatggcagatactgcgcaatccgctcccttatttccggcttttgttccggctcgttcgatggcctgctcaatggtttcagtcgtcacgatgccgaagataaccgggacgcccgtcgccgttcccgcctgggcgatgccttttgccgcttcattgcagacatagtcataatgcgttgtcgctcctctgataaccgtgccgagcgtaatgacggcatcgtattttttcgtttccgccattttctttgccgcaaacgggatttcaaacgctcccggcacccaagcgacgtcaatgtcgtttgattctacaccgtggcgaagcaacgtgtcttccgctccgcttaacagcttgctcgtaataaattcattaaatctgccgacgacgattccgattttaagtcctgttcctactaggtttccttgtatgatattcatatgttatccatccttttttgtgagattagtttttagaaatgaagcagatgtccaagttttttcattttggtctgtaaatattgcttgttatgctcactcgcctccatttgaagcggcacccgttctgaaatgctgagaccgtatccttcgaggccggcaattttccgggggttattggttaaaagtttcatatgctgaacccctaagtcgcggagaatctgggcgccgatgccgtagttgcgcagatcaggcagaaagccgagcgcttcgttcgcttcaaccgtgtcgtacccttgttcctgcaatcggtacgccttcagcttattgattaaaccgattcctctgccttcctggcgcaaatacaatagaacgccgcggccttcttcagcaatttgcgcaagcgcggcatgaagctgaggtccgcaatcacagcgatgggatgcaaacacatcgcccgtcaggcattctgagtgcactctgacaagaacgggttcgctgttaaacgggacatcccccatgacaaaggcgaggtgttcttttccgtcaacctcgtttgtatatccgtaaactctaaacgtgccgaagtcagtcggcagcgtaatatcaacttctctgttcacaagtgtcgtaatgttgtaacggtactctattaagtcttttatcgtaatcattttcagctggtggcgttcggcgatttcggctaactccggcactctggccattgtgccgtcttcattcataatttcacaaatgacgcccgctccctgagatccgcaggcttttgcaaggtcaacggctgcttccgtatggccggcccgcttcaggacgcctcctttttttgcgattaaggggaaaatgtggcccggacgctgaaaatcgtcagacacagattcttcgttcaacagcgcctgaatggtaaaggatcgttcctgcgcgctgatgcccgtttttgtcagcctgtggtcaatactgaccgtaaacgcggtctcatgtgagtccgtattatgatcgaccatcgggtgaagatccagccggccggcgatgtcttcagacagcggcgtgcagatcaggcctctcccatgggtcgccataaaattcaccacttccggcgtggcatgctcagccagcgctacgaagtctccttcgttttctctgtcttcatcatcgacaacaatgatgacttcaccttttttcagcgcctctaacgcctcttctatcggatgaaacatatcgatcttcctttctaaaagccgttctcgcttaaaaaggcttccgtgatagtttgattgcttttcgtttgttctgttttgtgcaaaaagcggtataagtatttgccgatcatgtcacactcaatatttacggtcgatccgactgttttcgtctgaaaaatcgtttctgagatggtatgcggaatgatggataccgtcacgctttcgtctgataaaccgaaaatcgtcaggctcacgccgtctaccgtaattgaacctttcaatacgagcgtttttgtcaattccggcgaaagttttaaatcgtaatagaccgcgttgctttttttctcgatccgcgtaatttccgccgttccgtccacgtgccctgatacaaagtggccgccgaaccgtccgttggcggacatcgctctttccaggtttactttactgccttttgacaagccgttcagcgaagtggttttcactgtttccggcatgacatcaaccgtaaattgattgtcagaaaatccggttacggtcaggcagatgccgtttaccgcaatgctgtcgccaagcttcacatcacttgtcacttttgaagcggcgatggttaatgccatggaaaggcctgtctttttgattgcttggatcgtgcctgtttcttcaacgattcctgtaaacatcgtcaccatcctttccatctttaggtatggccgtcagttttatatccggcccgatttgggtgatttgtgtgaattgtaaatgggggacatctttcattgattgaaaaccttcaccggagatcaagctgggagcaagcgttcctccgattaatttaggggcgaaatagaaatgaagctcttggaaacagccttccttgacaaaacttccgtgtacggatgctccgccttccacataaacggacattatgccgttttcagcgagaatactgagcacctcagggacgtgaatgcggtctgtttccagcggaataacttttattccgagtgcggtcagccggtctttcttttgcatgtctgcacctttggccgtaaatatccatgtcggcgcagcgccgtcagtgagcacatttgccgtttcaggaatggtcagctttgtatcgagaatcactctgaccggctgcttcaccgcatcaggaagcctgcaggtcaggctcggattatcggctttgactgtgcctgctccgacaagaatgctttgatgcgatttcctgtattgctgggcatcaagccttgccgcctctgatgtaatccatttgctgtcaccggtttcagtcgctgttttcccgtcaaggctcgcggccgctttcaaggtgacatacggaagtccggtccgcatgaagtgaagaaacattttattcagctcttctgcctgctgcctgagaagtccggttttcacttcgatgcccgctgcttccagcattccgatgccttttccggctacaagcggattcggatctttcacagcaatgaacaccctttttatccccgactttattatcagttcggcgcatggcggtgtttttccgtaatggctgcaaggctccagcgtcacatacaaatcggcgccttttgcgtgtctgccggccatatgaatcgcgtgaacctcggcatgcgcttctccgtattgcaaatgggcgcccattccgacgatctgtccgtttttgacgacgacagcgccgacaagaggattggactgtgtctgtccttcaccgcgcctggcaagttctattgccgtattcatataatattcttccatcgttatccctcccttcttccacgcaatttggcgtcaaaaaagccccgaatgtttacacagttcggggctttgccagttttaatccataggaaataagactatacagtaagtttattttttgcatagcttctctcatccttctcccatccagactttcactgtcggcttcagcttttcactgaatccaccgtatacagatgcatacgggtcacgggctgtaaagcgcaaaacgccttattaccgccggtcgggattttcacccagccccgaaggatacaatcaatatttttttgtccttatccgctattataacatcctttgcggcaggcgcaatgaatttgcacctaattattcagaaaaataaaaagcgcccttttcccataaaaggcgcctttatttattcgttcactttgacgaccttcaataagccgtcaatccggtttgatttgctgaaatacgctttaatcttatctccctttttcacatcggagagatcctgcttcagcttgtcgccgttaaaaataatttttgtgccgttttctgccgtaccgtggtactcagttccttcgattttcgtaattttatatgttttgactgtatattcttctttttcctgggacagggtttgtccgattgcagtcggcacgtctttcagttcaatatcgtttatgaccatataaccgcccgctaataacagcagcagtacaagtaaaatggctgcttttgttttaattcttcccatttttctacctccagcccgtatcaatctattcattactatgtcatattcctttttttcatgaatagaaaaccgttcttccctgcgtgagttattcatataacgtttcataaagggaagatgtttcatgtatctgtaaaactttctatctattaaatagatatacgaatttatgttctgtttttgagggtggaaagataaatttatataaaaaagcagttttcctcatgaagaaaactgcctgtacggtttatttcgtcttgcgaatttcattaaacgggaagaagacgaattttgatgtgcccgctatttgttttttcgtaaaaagaccgaggccgttgcggctgtccatagattctctgcggttatcacccatgacgaaatatttgtcgtccggcaccttcaccgggccgaagtcttctgtcagccggtcatagccgtcttgcttcgccttgtgcttatttgccgctaaatacggttcggacacttttttgccgttgatgtacagctggtcgtttttcatttgcaccgtgtcgccgggaagtccgataatccgcttgacatagtgttcgttttctccgttcagaacgacgatctggccgcgtttgaagtcgcttatgtatttgaccgtcatattgacaaagattctctcgcggtcatgcagcgtcggatccattgattcgccatcaacgagataaggggcaaataaaaagtttcggatgagcagtgccagaacgacagcgatgataatggctttcgcccaatcaagtacggcgctttttttagaagttttttctttttctgatttcaagtgatttcctcccattagccatggtcgtttttattttaccatgaatccctgcacagagggcaaataagccccgcacctcatccatttttttcattttataagccggatctgctgattttacggtatttcacgaagcttccgatccgccaaatgcacaaatacacaaaagcaagttccatcgttaaaacggcgaattccgccgcgtcaatgtttttgaaatattggctgagcacgatacggatcgcaataatcgcgataatgacatatttaaagtttttattccgcttggagtagacaaagccgtcttcccggatttcataggcggtttgcgacagcatgatgacaccgaataccgcgcctaacagtccggcgatggcgagctcccaaagagcgggaaaatgaaacggctttcccgggatattcatgagctggctgatgctgaatgtaaaaatgacggcgataatcaaaagcgggagaatgatgccgaagccgccgcctttaatcggcctgttcccctttttcaccctgaaccaaattataagtgcgagaatgataatgacaaataaaacggttgccaattgaaccaacgtttctacctcttttcattgttgtaatcggtctttatcactataccagaggaactactatcattcatatatgtattttttcatgatttacacatgagaattttcatatacataaaaaaacccgcctgaaaaaggcgggttttccgtcattatccttctacacggatttctttcattttgtctccgttagacatgtttttcgcatgctctaaaccgcttgtcacttttccgaatacagtatgaacgccgtttaaatgcggctgcggctcatgtacgatgaagaattggcttgaacccgtgtctttaccggcatgcgccatcgataaagaaccggcttcgtgcttatgcggattgccttctgtttcacatttgatcgtttttccgcttccgcccatgcctgtcccagtcggatctccgccttggctgacaaagcccggaatcacgcggtggaaaataacgccgtcataaaagcccgtattcgccaggttttcaaagttagcgactgtattaggcgcttcattcggataaagttcaaattcgattctgctgccgttttccatttcgatataaccagttttcattctcattcctacttccgtattgttttttgtcaaagccttcttcaatatgaatttcaattgtaagccggctttctttttgatattcttttgaaggaagaggcctctgctcttcttttcgcggctattataccacaccttcagccggaaaacgaatctccccgcttccgcagaaagaaaatgaaaccagaacagcttcacagccgtctatgtatcggaactgcttcacgcaggccctcacaaaccgcttcaaaacggcatttgtgaaaagaaggaggttaaccgctttgaaaaaaatgtggattggattgctggcggcggccgttgtattgtgcacaataccgaaaatcagcctggccgatgccgcagtcggagatgtcatcgtcacactgggggcggatctgtcaaacgaaaaccgtcagaaagtgcttgacgaattaaatgtccctgataacgcgacaaaagtgacggtcacgaataaagaagaacatgaatatctgggaaaatatatatcgaatgcccaaatcggcacaagagccatctcttcatcatccatcacggtggcaaagaaaggggccgggcttgacgttaagacccataatatcgattccatcacggatgaaatgtacttaaacgccctgatgacagcaggagtgaaagatgcgaaagtatacgtgacggcgccgtttgaggtatcaggcaccgcagcattaacgggaattatcaaggcatatgaagtctcatcagacaaagcgatatcagaagatgtaaaacaggtcgccaaccaagagcttgtcaccacttcaaatctcggggataaaatcggggataaaaacgcctccgcgctcatcgcaaacattaaagatgatttcgcgaaaaacggtgtgcccgatacaaaagaaggaatcgagaaaaaggtcgatgatgcggcttcaaaccttaacattacactgactgacgctcaaaaagaccagctcgtttcattgtttaataaaatgaaaaatgccaagattgattggggccaagtcggcagccagcttgacaaggcaaaagacaaaatcacgaagttcatacaatccgatgaaggcaaaagctttgttcaaaaagtcattgatttcttcgcttcgatttggaatgcgatcgtgtctgtatttacaggagacagcggatcaagttctaacagctgaatgcaaaaagagaccggacgccattgttccggtctcttttttatttattgtttgacccccgtcttaaacggcagatccagttttacaatgtcttcataagtttcccttctaatgacaagatgcgcttcgccgtcttccacaaaaacgacggcgggacgcggaatgcggttgtagttgttagccatgctgtatccgtatgctcccgtgcagaaaacggcgagaagatcgccttctttcacttccggaagatctatatcccaaatgagcatatcaccgctttcacagcacttacccgcaatggataccgttttatcgtggtgttctccgattctgtttgccgatacggcttcatatttcgcctgatacagggcaggacggatattatcgctcatgcccccgtcaaccgctgcatatttacgggtgccgggcacttctttttgcgaaccgatggtataaagcgtcgttccggcgtctccgacgagcgagcgtcccggttcaatccagatctccggaatgtcaaaagcgtgcagcgctgcgttttcttttaccgcttcgataattttttccacataaacggcgggatgaaggggttcatcctcctccgtgtagcggatgccgaagccgccccctaaattcagcacttcagagacaaagccgaatgattctctccattcattcagttttgcgaagattttttctgcggccaacacaaagcccgccgtatcaaaaatttgcgatccgatgtggcagtgaacgccgagaaggcggatatggtctgactgtaatacttgttcaatcgccttttctatttgcccgttatgcagatcaaaaccgaatttggaatcttcctgtcccgttgtaatataatcatgcgtatgcgcctctacccccggagtgatccgcagaagcacatccattgtgcgccctgatttgcggcacagttccgcaagtaaggatatttcataaaaattatcaacgacgatgcagccgatttgatgatcgagcgccattttcaactcttcttcgcttttgttattgccgtgaaagtgaatcctgtcagccggaaaaccagccgcaaccgccgtaaacagctctccgccggatacaacgtccagtgagagcccctcctgctcagcgagctgtatcatcgcaacagaagaaaacgccttgctcgcgtacgcgacctgcgcctttaaatccgcgtcaatgaatgcctgtttaaagcttttagcgcgctcacgtattaaagccacatcgtaaacataaagaggcgtgccgtaatgctccgctaaatacagcgcgtccacacctccgatttccaaatgacctagtttgttttgtctgcttgtgccatgtaagaacaatgctcattccctctttctgatccgcatatgggtgaaaaggacagcttcttttgagctgtccttatacaagtcccgtataagttaagacatacaatatcataatcttctgtcggtttcaatgcgattatgaaccgcttggctgtctttgacggtctttcgggtgaacaatgctcggtctgactttggctcccggcactgtcgtccggacgagcacctgccacaacgccttgccgttaaacggtaaaaacggccataaatacggcgtgtgaaacgagcggatattcgccattatgatcagcagcaatgtaaaacctatcacaaagcctttcacttggaaaatggccacgagcaccattaagatgaggcgtatcattttattggcgaggctgagctcatagctcggcgtggtaaatgatccgatggcggcgatcgatacgtacagaatcacttctgctgaaaacagccccaccgctatggcgatttgaccgatcagcaccgccgcaatcagacccatggcggtggataaagcggtcggcgtatggatcgcggccatcctgagaaactcaatccccaaatcggccaaaaagatttgcagaatgatcgggatgtgcgtatttttatttaaaccgataaaatccaatctttcaggcagaagagacggttcgagaacaaagaggaaccaaatcggaagcagaacggttgaagcaataataccgaaaaacctgatccatcttaaaaatgtgcccactgaaggcgcctgcctgtattcttccgcatgctgaacatggtgaaatatcgttgtcggcgttatgatcacgctcggtgacgtatcgacgacgatgatgacgtgcccttccaaaatgtgattggctgccacatccggccgctctgtgtatctgaccatcggaaacggattgtagccttgtttgacgatgaattcctccaccgttttatcagccatcgtcaatccgtcaatgtcaatcgcattcacttcgttttcgacgatgctgacaaggtccgggtccgcgatgtcttctatatacacaatcgcaagatcggtcttagagcgctcgccgactttcgtaattttgacgcggagcctttcgtccctgattcgtcttctgatcaatgctgtattaatgacgatattttcaataaaaccgtctcttgccccgcggacgaccttttccgtatccggttcttcaggtgtgcgtccgggataacttctgacgtcaacgataaaggcgaagcccgcgtcttcaacgataaccgccacaagtccggaaagcacttgatccgttgcttcgtcgagcgttttgactttttgaacctgctgattgacaagcctgttttcaacaacgtcaatcgcttcatccgcattctcgtcataattattgacgtcgacgagctgttccattaaatgaatgataaacaaagtatcggttaatccgttgacaaagtaaatctggacttcccggtctaatactcgaactttgcggacgccgacatcatagctcgttcccataccgacgcggtctttaaaaaattgttcattttttctaggatcccggtacaccttgatcatgttttccggtttttccggcatggctttcgctcctttctaaaatgaattcgaccgccttcatcgtgatcggcgagcctttggatatgtcatcttttcttcccatcttacctatgtcgccgatgcccacaatgaggggaacgtccaatttatccagacaatacaccgtatctccgttcattctgtgctcgtccatttctctcattccggttttatcgacgccaaactccgtcacttctccatcacggtcaatggagacatcgactttcgtccattcagcctgatgggtcttagaagcgaccgcaatcacccccagcacttcaatgtcctgatgtgaggcgacatatttcagcgccgtttcgcccggcccttccccttgcaggcctgaatcgtcaaacatgacaaacaccgggtcattcggcgcggctttaatcagctgaacaagttcggggccgcttctcgttgacggattgccctttgattgggaaatacaccgtccgcctgctttttccgcggcatattcaattgttttggcggcgtatacgtccccgtctgtcacaagaatgaccttccgtttcgtcatcaggcattatcctttcggtttaaaaataacggctacaagaaatgcgaataaaatcgctgaagatataccggcggaagtaagttcaaaaatccccatggcgatcccgataaatccatgctcgtgagcttgatgcatggcgccgtgcaataagctgtgaccgaagctgacgatgggaaccgtcgcgcccgcgcctgcgaattcgataaatttgtcataaattccgaacccatctaacaaggcgccgataacgacaaaagttgtcatcacatgggcgggtgtcagtttaaaaatgtcaagcagcagctgaccgataatgcaaatgattcccccgcaaacaaaagccaacagatattccatttatgatgcacctcccgcccgctcaaataccacaccgtgcgcgatggtcggaatggtttccttctgctggatcattgtcggactcaaaagcgctcctgtcgcgacaacgagtaccctgtttagagtccccgcttttaattgattaaaaatatgtgtgtacgtaacaagcgcagagcaggcgcagccgcttccgcccgcaaacacctgctggtccggcgtatagatgagaagaccgcagtcatcgtgtttcgttcccacgggatagccttcttctttgagcaaatctttcacgatcggcgagccgacgcctgaaaggtctcccgttaaaatcagatcataatcatccgccgtgcggtttaagtcctgcaggtgctgtttgattgtgtcggcggcagcgggcgccatggcggaccccatatcgaacggatctgttattccgaggtcgcttacttttcccactgttgcgcttgtaatcttgatatcagaagggttttggctgatgatgaccgccccgccccccgtgaccgttgaagtggcggtatccggtttttgcccgccatactccgtcggattgcggaattgccgttctgccgtcgcgttatggctgctcgtggctgcgatcgcccggttcgcaaaaccgccgtcaatgagcgcggatgcgacggcaatcgtttccattgatgtcgaacaggcgccgaacagacagaggaacggaattttcagatgtctggcgacgtagttggcggtcacattttgatttaaaagatcccccgcgagtaacaaatcaatatcgctctttttcaaattctgtttttgcaaagcggagttgatggcatcttccattaactgacgttccgccatttcccagtttttctgattgcaatgcatttcatcgtatgtcttatcaaacagcgaaccgagcgggccgtctttttctttcggtccggctgccgtccccgccgcatttacaaataacgggttttcaaacacccaggtttgctttccggtcaatttcattttttctcctcctacgaaaacagtttttcacaagcaaaccgtatcaggcctacgatataggctgccacgacgccgaatacaatgacgtttcccgccaatttaaacatgtttgtcgctaccccgagcacgagtccttcacttctgtgttcgagagcggcgcttgtcatactgtttgcaaaacccgtcaccggcacggctgaacccgctccggcaaactgcccaagtctgtcataaatgccgaatccggtcaaaagggcggaaattaaaataagagtggcggccgtcgggttgcccgctgttttttcattaaaattaaaaaagtggatgtaaaagtcttgaagagcctgcccgatcagacagatcaaaccgccgatcagaaaggctttgacgcaattccaaacatatggcggtttcggctgatagtctttcacttttgttttgtaattttcttttaagtttgtcatgtcggttcctccttatgaatgatggataaaatacagccaatgaaataaagagccggctattttgccgaacacaatagccatcagcaatatgatgattttgctgccgaagccgatccgtttggcaagaatgggaagcacattcagcacttctgtaagcgcggcggccagcatgccgacaaacatgccggccaaaagcccgaccggaacggccagccattcagataaaaaaaaatgattcatatttaaggtttcccagccgccgaacacagctcctgaaataacagctccttcgtaggcctgtacaaagcgcattgtttttgtcagctgcataaggcgggggacgattcccataacggttaaaaaagccacaaagcctgcccccacggtcagccctccgccaagcccgacaaacataacgaaaagaatgctaacgatcatgcagatctttcatcgtctcttcattttcgtgcattgcgacataatgatcgagatcaagctgataattaaacatctcgacttccagcgggcttggctcttcattcaggcgttttttgaagatgtgattaaaaaagacgatcataccgagaccgaggccgatgctgtacggaatctgaagcagatacggatattcattccgttcgcccgttatgatttcatataaggcgatatgaacttctctcatactgacatcttcatgaaaattcataatggcaagacatgaaccgataaaaagcaggagccagacaccgacgaacaaaacggctgacagctgctttttctggtaatggatttccactatcgtttcagcgccgccgacggtctgtacatcaagagcgggaaaagcggtatgaatggttttcagcacttttatgatgtccagcacgacgatatttttgtcttttttcgtgaccttatacagcggcagtgccgacagtttttttttcagcttttgctgtcccgcgatctgcgcggcgtcgccgattgtgatgatatctccggtatgagccttcacgcggtggcgaagtctgagaaatattcgtctttccatcttgcatcaccatctttcgggtggttatatatgtagtatgcggttcacttttgttctcattcaccagcggcaaaagaccataaattaccaccgatgcacaaataaaaaaagccggcccgtaaaaggtcagctttccgtatgatccatctgcactttaatctgctttaatatttttttctccagcctcgatacctggacttgggaaatcccgagccgttcggctacttccgactgtgtctgatctttataatatctcagatagacaatgagtttttcccgttcttccaaatcactgatcgcttccttgagggcgattttgtcaaaccacttctcttctgaatgatcggcgatctgatcaagcagggtgatcgggtccccgtcattttcatacacggtctcatgaatggatgaaggcgcccgcaccgcttcctgcgcaagcaccacatcctccgcatcaatttctaaatggtccgcgatttcctggacggtcggcactcttccgtatgtttttgacagttcatctttcgcccggcgtattttattgccgagctcttttaaagatcttgatactttgacggttccgtcatcgcggatgaagcgctggatttctccgataatcatcggcacggcataagttgaaaaacggacatcataggacaaatcgaatttatcaacggattttaacaatccgatacagccgatctgaaacagatcgtccggctcatagcctctgtttaagaacctttgaacgacggaccacacaagacgcatgtttttttctatgaggaggtctcttgcctgctggtcgccctcttggctctttttgattaattctttgacttcatggtccttgagctgcgcgtttttggtgtttttcttaacctccacatccataacaaatctccttaattacaaagcgctttgctttttgataggtgttttgttaagcgtatcgtcgttcccatctccggcgaggaatcaatcgtgacatcatccatgaagttttccataatggtaaagcccattccggagcgctcaagctcgggttttgtcgtaaagagcggctggcgcgcttcctcaagatccgtgatcccgaggccttcgtcacgtatggtcagatagacgacatgatcctccagcgtaacggagatgtacacctttccgtcacagttttcttcatagccgtggatgatcgcgtttgttaccgcttctgatacgacggtcttgatttccgtcagctcatccatcgtcgggtcgagctgtgcgataaaagaagcaactgttacgcgcgcaaacgattcgttctgactgagggctgaaaattcaagatgcatctcgtttttcatgatgccacccccaacgttaaaagcgctttttgttctgattgttcgaacctgatgattttaaacaggccggacatgtcaaacagacgtctcaccgcgggcgaaatcgcgcacacgaccatttctccgccgagctgtttaatttgtttataacgccctaaaatcacgccgaggccggagctgtccatgaaggtaagatcttcaaggttcagcacgatgtgacggatgccgtcagcctccagcgattcagtaaccttttgttttaatgattctgccgtatgatggtcgagttcacctgttaatcgaatacaaagcacggattctttgacatgaaagtcaattccaaggctcatgctcattcctccttgatatgatcggataatgagtgtttcgattttcgggaaagcaattccttcactatgacaaaactagtgcccgttcgccacgattatttaaattttgtccaatctcccatcgtccgcttcagaaaagtgagaaaacccgctttttccatgtcgtcttttgccgtgaccgggctttcaacgagcacctttccgtcttttttcagaacgaggctgccgagcacttctccttttttaaccggagccgttacattgccgttgattttcacttctttttttactttgtccatgttctctccctttttggccagaagagaaatcggctcagatgtggtcagcttgatcagtttcttttttccttttttcacttttaccgttccgacgatttgagcccgtttgtacagcgggtgtgttttaaactggctgaaggcgtaatcaagcattttggtcacttgggcatttctttctttcggagtgctggctccgaaaacaacagcaatgaccctcatatttccttttttagcggtggcggttaaacaatacttcgcttcgcctgtaaagcccgtcttcacgccgtctacacccggataaaatttgatcagccggtttgtattgacgagccagaactttttgtctgtattttctcttaaataatcctcatacgttcccgtaaattgagtgattttatcatactttaataattccttcgccattttcgccatgtcataagcagagctgtaatggtctttttcaggcagtcccgtcgggtttttgaaggaggtatctttcaatcccaattcttttgcttttttgttcatccggctgacgaaatcctcttctgaaccggcaatatactccgccattgcgacagatgcgtcatttccggaagctatcgcaattcctttgagcatttcttttaccgtcatttcttctccgggttcaaggaaaatctgtgatccgcccatggacgcggcatgttcactcgtcctgactttatcgcccatctttattttccctttgtcaagcgcttccatgattaaaagcatggtcatgatttttgtcatgcttgccggcgccagacgctcccggctgttcttgttataaagaatgcttcccgtatcgcgttcaatcagcacggcgcttttggcttcatgagcgagctccgatgtatgttttccgtccggctttgcaaaagcggacggtgctgatgccgttaataaaatgccaatcaacaaagtggatataagacgtttcatctccaaagccctccatttcataatcctttttattttttccaaatccggtggttttatacgcctcatctggaaaatgtttcgtgttgagggcacaaaaaaacagctgcttccgaagaaacagctgacttatgctgacttatttttgagatcgtgcgactacggcttttacaagcttcaaaaagccgccttttactttttccgtcatttccattacttcttcatgggataacggctggtcaagaatacctgccgccgcgttggaaatgcatgagatgccgagcacgcgcatccccgcgtggttggcgacgatgacttccggcacagtcgacatgccgacagcgtcagaacccatcgttcttaaaaaccgaacctcagcaggcgtttcgtaagacggccccgtaacagctgtatacactcctttttgaacaggaatgcctagctcatcggccgttttttcagccaagcctgacagctctttgtcataggcttctgacatgtccgggaatctcggtccgaattcagcttcgttcggcccgattaacgggttggtgcccgtaaagttgatgtggtctgtaataatcatcagatcgccggcgcggaattcagtgttgataccgccggctgcattcgtcacgacgagagattcaacgccgagcgccttcatcacgcggacgggaaatgtgacctgatccattgagtagccttcatagtaatgaaagcggccctgcatcgcgatgacctgcacaccttcaagcgttcccatcacaagctggccggcatggccttctaccgttgagaccggaaaatcagggatcgtttcatatgtaatcttgacagctccttcaatttcatcggccaatacgccgagccctgaccctaaaatcagaccgatctttggtgtttctttcacgtgttctttaataaatgcagcagcacgttcgatcttttgtttcaaaaaaagtccccctactgtaatcttgataaaaagctttttccgtattccggcttttccgttttgaaattatccgcaatggttgcgccgatatcggcaaatgtatccgcaagcggcagctgttcagtgtgtttgtgctttttgctgtacacaagaagcggcacatactccctcgtgtgatctgtgccgtgatgaacaggatcattgccgtgatccgcagtgatgataagcagatcgtcttctttcattttctcaaacacttccggaagcctcgcgtcgaattcctcgagcgcttttccgtacccttccggatcgcggcggtgtccgtacagcgcgtcaaaatcaacgaggttggcaaagctcagacccgtaaactcttcaccgagcgtttcaatcactttgtccatgccgtccatattagataccgtgcggcgggaagatgtaatgccttctccgtcataaatatcagaaattttgccgatggaaatgacgtctaatccgctgtctttcattccgttcattaccgtgcggccgaacggtttgagcgcataatcatgacggttcggcgtgcgtttgaagctgcccggttctccgacgaacggtcttgcgataatccggccgaccatgtatttcggatcaagcgtcagttctctggccgtttcacagatgctgtacagttcgtcaagcggaacgacatcttcgtgagccgcaatctgcagtacggaatctgctgatgtataaacgatcagcgcacccgtttccatatgttcttttccgagctcgtccagaatcgccgtgcctgaagccggcttatttccgatgattttccgtcctgaacgccgctcaagttcctgaagaagttcatccggaaatccttccgggaacactttaaacggtttttcaatgtagaggcccataatctcccagtgccccgtcatcgtatctttcccgtttgacgcctcctgcatttttccgtagtacgcaagagggtgctccgttttttccacgcccttaatgtctccgatcagtccgagaccgagctgcgccaaatggggcatatgtaagccgttcatgtgctctgcgatgtgtccgagcgtatttgcgcctatatcattaaaatcggcggcgtccggcgcttcaccgattccgacagaatccattacgatcaaaaatacccggttatatttgtattcagacatcataaaagcctccttttcttccatctgtccattgtagcttacagaggtcagacaactcaagtataaaccgtttacattcttgttgacaatgccgattcaaataattagaaccttctctgtattccgccaatccggcaaaaaagccgcggcccctctggcagcggctcctaagcgcgcggatgatactgtttgtacacgtccttcagccttgttttcgtcacatgcgtataaatttgcgtggtggaaatatcggcatgtccgagcatctcctgcacggcgcgcagatccgccccgttttcgagcaggtgcgttgcaaaggagtgccggagcgtgtgcggtgtcagctcttttttaatccccgcttcaagtgcgattttttttaggtttttccagaatccctgacggctgatctgcctgccgtgatgattcagaaaaagcgcttcggttacgtttttctttaataatttccctctggctttttcaatgtatgcttctatcgcatgagaagcggcttcaccaatcggcacaatccgctctttccgcccttttccgaagcagcggacgaatcccatcgtcaaatggacgtcggataatttcagctcgatcatctcgctgaccctgatgccggtcgcgtacagcagttcaagcatggctttatccctaaggccgaacgggctgtcaagcttaggcgtgtccaataaccgctcaacttcgtgaagcgccaatactttcggaagcgtccgctctgttttttgtgtttcaatatgtaccgaaggatctttatccgcggctttttcccttaacagaaattgatgaaaagaccggatcgacgccaaatgcctggcagacgtcttgccggatttcccggagtcctttatatgctttaaatattgaataatatgaagacgggtcacatcattccatgaagtgatctgaaggctttcagttaagaagagagaataacttttcagatcacgctcataggacatcatcgtattttgggacagccctctttcaaccctcacataatggatgaaatccttaatttgatccttcactcttgatctactccccgttttggtaaaaaaagatcaatcggccgaaccagccgtctttatcctcttgttccgttttggccactttgacggcggagccttccggtttatcgtaccgatgatagttttcatactctgaattcacccatatcatagcataatagaacagcgcggtaaaacctgtgaacagaataaacactttgatcgtatccgcggctgtttttaggaatctgcccatctttcgatcgaccctttcttttggcggctgttagtacaccttatgccaatttcaaaggcttttatacataaaaacagcaaaaaaccctttcctggcagaaaaggttcgtaggcttttactctgtttcatccccgcggcagcggtggcagattccgtgaaaagtcaatctatgatctttaattttaaatttccaatcacgttcaatcacttcttcaacgtcttcaagcagatcttcttcaatttcatcgacggctccgcactccatgcacaccaaatggtgatgaaagtgagccgcgccttctttgcgaaggtcgtagcgggatacgccgtccccgaagttaattttatcaacgacttttaattctgttaataattctaatgtacggtatactgtagcgagaccaatttcaggagatttctcttttacgaggaggtatacatcttctgcgcttaaatggtcttcttcgttttcaagcagcactcttaccgttgcttcccgctgtggcgtaagcttgtagcttgacgagtgcagctgctttttaattcgatcaatacggttttccatgtctttccctcctacgccgcattccatgactcattataacaaaatacgcgcagagttccaactataattattataaactgataaataaaagtattattttgtgataatcattctaaaatatgcgtgatgacagcttttccataaacagcggagacacgtacgcctcgagcagcgaggcgatgaccgagaagaaaacgatgagaatcagcacgaaggcgtaacgtccgaaccattggatcggcgcgtcatgaaggctgcgtttgacaaacagctgccggatcagtttcagtgaaaaagcgatagagcatgtccccatggtaagatacgccggaatgagaacgatgttttgcggcagaaccgaaataaatgacaggaaaaacccgttcatccccatttgattcactaaaaaaccgaccgtgaagccgacgacgattccttttaagaacaccataatgaaaataaccggaagaccgatcacggaaataccgagaatccacatcagccccaaatatttcacatcatgaaagacggcctgccaaaacatttctgaagcgccggcatgttttccgtcagacagctgtccgaaaaacttgcttaaatagtaatacaaatcttctttctgcgtgatggtcatgctgttgacgatgatcgccccgaaaatgacccccatcaaaaacaagacgaacacaaatatataaagtgacagatgatcctttacatggcgaaaaaacagttctttgtacgattgttttctcataccgctttcctcccgctaatctattgacttgatttagtagattgtatgaaagaaaagagaaaacatgacagagaaatcatagaaaggcgcgagattcgggcataaaaaaagaacccccgtcatcactccggtgatcataggggtttctttttttatgctttattctttcgagcctgtcttttttggttttcgtcactctttcatgggtgctgaaagacggcgccgtcccccttgacaggactgcgtcacgcatcccgtttcttttgagatgctcccgcatttttttcgttttgctcttcgccatgtgccaaccgctcctttttcccttttctttatcataacaaaaaaatccggatgtgttcatgaatacggctcatgtttcgaccggtaagcgcgcagagacgttttggcagatgaatagctccccattgcggcgtatccgtaaaaaaaacccataaaaatccccgcatacacgtgttcatgatgaccgaaaacgatagacacaacatttccggcagcaagggcaatcgtgggaacgaatatgcccggaacccggcagaacactttgatcagctgtgtgacacataagacgaccggcacgccgatcacagcatcccaaatatttgtatggatcagcggaaaataatccacatcgacacctctttattccgtcttttgctatctgttagcctgcctaagaattccgcttcctattcatgataaaaaaacagcaccggcacatgtccggtactgtaagagttgtttatttccctgccgcggcccgttctacggctgctgatacggcttgatgcacgtccgcatccaaaggctgaggcacgagatcgccgtgtttcgtgcaagaggcgatggcttctgcggccgccacaagcatttcatggtcgattttcttgcttttggcgttcagcgcgccgcggaaaatccccgggaagccgagaacattattgaccgaacggccgtcagctgcataagcggctccggcttgtaatgcctcttccggttcaatctccggcttcggattagataaagccagaatgacgtgtccttttctgacatcctcttttttaatgagacccggaactcctgtggtgctgatcacaatgtcacacgtgtccattaattctttgatgcttccaagcggctgacctccgtactgagcgaggcggttcattgcgtcttctgacttgtccgttccgcagaccgctttgactccgtatgccataaacatgcggcagatggcgacgcctgccgcgccgagaccgatctgaccgaccttcgcttcttttaaatcaagaccggcgcttttacaagcggaaatggcggcggcgagcgtgacgaccgccgtgccgtgctggtcatcgtgcataaccggaatgtccagttcttctttcaggcggtcttcaatgtcaaagcagtggggcgaaccgatatcttcaagcagaattccgctgaaccccggagaaatatgttttaccgtgcgaatgatttcttccggatcagaggtatcgagcaaaatcggaattccgctgatacccgccagctggtcaaaaagcgcggctttcccttccattacgggcattccggcgacagagccgatattgccgaggccgagaatcgccgttccgtcggtgacaatggcgacagaattgctgattgtcgtatagatggacgctttttcaggctcgttttcaatcagtctgcacacatcggcgacacccggcgtataaacacgcccaagctcagccagtgtccggatcggcattttgcttttcatctgaattttgccgccttcatgagcagagagcacttcatctgagactgtatgaagccggatgccttcaccgagagcttcaatggcttgaatgatttcctgcagctgctcttcattttcggcctgcaccgtgatgttgcgcattgtgtagttcgggccgactttaacagtttcaacttccccgatatctccgcccatcactccgatggcggttgccacttttccgagatttccgggaacagtcggcgtttcaatcattaacgtccgaatcatatgctttgtaatcatgaaatgaacctcctaacccaatttttgagattgcaaggatttttctttcgtgtaccaaatgaatttccccgtgtacccgtacaatattgccagtccgatagatacaaaactgagccacatgaacggcagataagaaaatgtggatacgccgagaatgccggccatatagatgccgttatcagaccacggcaccatccctgaagtaagcgtgccgcccacctctgcgttccgggataaaactcttctgtcaagtttcagtttatcataactgttctccatgattttcggcgtcagaatcaatgacacgtacatcgcacagccgaaaatgtttcctaaaagggcgacgatcaatgtcgaaagcgtcacatttcccggtgtggtcagctttttctcaaaagttgagacaatcacttttaatacgccgagcttctcaagaattcctccaaaaccgagaccgaacaggataacgactaacgtatccagcataccggtaatgcctccgcggtttaacaggccgtttaaaaattcgacgtccgttttaatagaaaaaccattataagcagtcgcgatggcactggcaaaattcattccctgaaagacggaagcccagattgcgccaagcaaagcaccgatgacgataacgggcatagacggctttttcaaaatcagaaggacaacgacgacaacagccggaatgagcatccatatatgaatgtcaaacgttttctgcaatgaagattttaaaaattccactttgccgagatcaatattttttccgccgtatataaatcccgttacggtaaacagaatggccgtaataatataggacggaattgacagatacatcatcgctctgacgtgtgacagcacatccaccttagaaagcgtggaggcaagcaccgtactgtcagacagcggtgaaagcttgtctccgaagtaagcgccggacaaaacggctcccgctacgatcggaagcggtatacccattccctccccgatggcaatcatggcgatccctgcggttcccacggttccccacgacgttccggtcgcaacggacataacggaacaaataaccagtgtggccagaaggaaaatatgaggattaataaactctaaaccataataaattaacgtcggcacaacgccgccggcaatccatgtcccgatgagcgcaccgaccgaaacgagaatcaataccgcttcaagaccgtttgatatcccggtgacaatcgaagcctgcaagtctttatatgaatatcccagcctgactccgagaataatagcgaaaaaccaggatattaatagagctagctggatcggcaggtctaaaaacactgtgaacgataagacaagtgctaaaaacccgaataataagataataatttccaataaatttggcaatctggcctctttcacaagaaaatccccctagaagaaaaaagctaaaacgctttcatcaaatgatataacaaattatactatactgcctcatccctttgtatggcaaccgcctattcactaaaaaacgtgaaaaggcggctgttattgctttaaaatttatttttctaatagatcttttccggcaatccccggttttgtcatttcatatggattcaaaatgatatccaattcttcttctgtcagtacatcattttgaaggcaaagatctcttacagattgccccgtcatgattgcttcacgtgcaattcgcgcagccgcttcatacccgaggtgcggattgaccgctgtaatgacgccgacgcttttttccacgtattgcttcaggcgtttttcgttggcttcaattcccgccagacaatgatcggtaaatgaacggaacccgttattcatgatgctgatggattgaagcaggttaaatacgagtaccggctccattacgttaagctccagctggcccgcttctgaagcgaggcagatcgtattgtcattcccgatgacctggaaggcgatttggttgatcagctctgccattacagggttgactttcccaggcataatggatgatcccggctgacgggcgggcagtgaaatttccgcaagtcccgcgcgcggacccgaagccattaagcgcagatcgttggcgattttagacatgttcatcatgcatactttcaacgcggctgaaacttccgtatacgcatcagtgttttgtgtggcgtcaaccaaatggccggcgccgacaagcggcagtccgctgatgtcagccaggtgcttcacaacctgttctatgtagcgcggatcggcgttaagtcccgtacctacggccgttgcccccatgtttacttcatacagatgctggcgggattgtttaattcgctttatgtcacgctcaagcacgcggctgtatgcttcaaattcctgtccgagacggatcggcacagcgtcctgaaggtgtgtgcgccccattttaatgacagaatcaaattgtttcgctttatctttaaagacactgagcatatgcgccatcgtatcaaggagcttatccaaaagtttcaaggttgaaatatggattgccgtcggaaacacgtcgttcgtcgattgtgacatgttgacgtgtgtgttcgggctgaggtgaatgtattcaccttttttatgccccatgatttcaagagccctgttgccgattacttcgttggcattcatgttcatggacgttccggctcccccttggatcggatcgacgataaattggtcatgccattttccctcaagaatttcatctgcggcctgtacaatcgcatttccgattccttcatacagccgttttacatccatgttggcaagcgccgccgcttttttgacgatggcgagcgcattaatcatttcttcgtggatgcggtagccggtaatcggaaagttttctttcgcgcgcagcgtttgtattccgtaatacacatcagcttcaatttgtttttctccgaggaaatctttttcctgacgatattctttttgcgcgtttgtcatgctaaaaccctactttctctttgtggtagtcatgtttttacagtacaacgtcgtctgcgatcggtgtctccataatgtttttgacttcagccaagttgtgagactggccgagcgcccacattaatttcggcacgatggcttccgtgttcatatttctggagcggataatgagatcttgattgactcttcggccgacttcatagacgctcatgtcctctccttcttcaagacattgtgtcgtaatgacgacgacaatgccgctttcaatcatttcattgactttggcgagaatgtctcttccttcaaacggcacgccgccgctgccgtagctttcaatgacgattcctttgtacatgccctttaatgcgtcaaacatttccggtttcagccccgggtgtagcttgagcaggcacacgtccgtgcaaagtgaagtattgaccgtaaaagcatcgtcttttggcatgtgcacttgtttgttgtattcaattccgttttcggtaataaacgcgatatacggatagttaatgctctcaaatgcatcatagcttttcgttcttaatttaatggcgcgtgtgccttgaatgactctgccgtcaaatacgacgtatacgccgcccaccccttcacatgcgaagcggatcgcgtccgtgatattttttttggcatcggttttttgaaatgtaatcgggatttgcgaacccgtaatgacgatcggtttatcagcatgctgaagcatataagacagtgccgctgatgtataggccattgtgtctgttccgtgcgtaatgacgaacccgtcatatgcgtcatatttttctttgacagcatttgcgatttcggcccagtattcaggctgcatatttgtgctgtcgatgttcattaacgaatgggtttccatcgtgtaatcgttatcaagttttgatacgtaggttaacaattcgtctgctttcaccccgggtgcaagcccgttttctccttcgactgaggcgattgttcctccggttgttaacagcaataattttttcataccctgcacctcttcatccatttctcaagatgtgttaagcattcgcttttcgcatacttttaatcaaattatagacagacgaatgaaattaatcaagtgattattattcaattcgcgtacacttttgcatatcgatatgatataatttgctcaagtgaaaaggagcggttttgaatatgaatttagatcgtttaactgaactgagaaaaaagaaaaattggtctcttcaatatacggctgaccgtctcggcatcgccaaaagcacgtacgccgggtatgaatcaggataccggcgtccgtcattcgaggcgctgggcacgcttgccgatctgtttgacacgacgtgcgacgatttactcgggcgcactgaaaaaaaggcggagccgtttgcccagaccatcgaattaacaaacgccgcacaaggccgcggcacactgaccgttgacggacagccgctgaatcaggatgaaatcatcgaattgattgcgtttgtccgcacgaaaaagaaggtgcaggaggagctccgttaaaaaccggcttttacggcttgattctgccgtacgtccctccgcccccggcctcaaggacaagctgcccggtgcgcgctttatgaatgacagccgctattttaggctggacgacacgcgccaattcctcttcttgcgcctgatgaagaatcgccatctccgtcccgaaagcccgcttcagtttttctaacgttttcggcccgaccccgggaatgaactgcagcgggatttgatgaatatacggcggccgcggcacgcggctttttttcgggccgctcagttcctccagccgttcactgaccccttttgtcattgttttccccccgcactccggacatgcggaagctcctttttcaaccgggctgccgcagcggtcgcaagccgtccggtaatacttcccgagcttcgggttcagcccgtaattcgccgtgatttttcttccgtccttcccttttaaagccagcgaaaattccgtgaaattcgcttctttaagaagcatttcattatattctctgccgatttttcctaaggaatgcgcatcagaatttgttaaaaatgtatacggatcaagttctgttacccgcgaagccatgtcggtgtcacagcttaacccgagttccgccgcgtcaatgagcgacgggtcgaaaacctctgtcaaagaagatctgaccccttttccgtacaggcttttatgcggggtgaacatatgggcgggaataaacagcccgcccaattcctttgttttcctttgaagattcaaaccggtttcataaatgcgctgggaactgagatggatatttttaagcctttttgcaagccactcagaaaacatcttcatttcggcaagagacggcataaagacgagaacgtgaatcggcccgcggcatgtgtgatcatagatttcaagctcactgcccaacagaagcgtcgtattccgataccggatgccgccttctttcagctcacggtatctgccttcatcaattccgcgctcgatttcttctatgacttccggggaatggcagtcgatgatgcccaatagttcaattcccttcccctcactggcttcttctaaaatccggtgcagcgtcaacgttttggccccggtgattttgaccggttttcccgtataggtgcggccgatatgaatatgcagatccgcatagatggttttcatcatttttccttcagcgcttctttcagctggagatactgaatcgcgtaagccgtttttgcgtcatacaccctgcgggattcaatcagcttcacggcctcttcaagcgtgacctgcatgacttcgacaaattcatcctcatccagctctcgtttttcttccagcggcgaaagcccttccgcaagaaagagatgcacgatttcatcagcaaacccgggtgatgtataaaaagcggtgattttcgtcaaggtttccgccgtatatcccgtttcttcctcgagctctcttaacgccgtatgttccggctcttcccccttttcaagcttcccggccggaatttcaacgattgtccgttccagcggctttctgaactggttcaccaaaatgatttttccttcttcggttaccgcaagtacggccaccgctcccggatgtttgacgatttcccgcttgcttgtttttccgttcgggagctctacgtcctctaagtaaagatctatgactttcccgtcatacagcttttttttcgcaagtgttttttcttctaaatgtttcatcatgtcatctcccgttctgtctctctattatgcctcatatattttatcatacatgcatgagagggaggtgcttttcgattgaaggtgtaccggaaggataagagtatcgtattggtcggaaaggcgtgggaagtgcgggctaaactgaaagaatacggacggacattccgctatgtcggagattggatcaccgggccttaacagttgaaaacttcgcgcctttatattacggtcaataaaagactataaaaaggagcgaaacgatgagaaaacgcacactgggacattctgatttagaaataagcgaaatcgggctcggctgtatgtcgctgggcacggataaagctaaagcgctgtctattttggatgaagcgatcgagcttggaatcaattatttagataccgctgatctttatgatttcggcagaaatgaggaaattgtcggggaggccgtcaaaaaccgcaggcacgacatcattttagccacgaaagccggaaaccgctggaatgatgataaagacggctggcattgggacgcttccaaaggatacataaaagaagcggtcaaaaacagcctgcgccggctgaaaacggactatatcgacctttatcagctgcatggcggcacgatggaagaccatattgacgaaacgatcgaagcatttgaggacttaaaacaggaaggtgtcatccggtattacggcatttcctcgattcgtccgaatgttattaaagaatatgtgaaaaaatcaaatatcaccagcgttatgatgcaatacagcctgctggaccggcgtcccgaggagtggcttccccttttagaggagaacggaatcagcgtagtcgcaagagggcctgtcgctaaagggcttcttacggaaaaaccgcttgatcaagcggccgcaagcgtaaaagagaacggctatttaacatattcttttgcagaactggcagaaaccaaaaaagcgatcagcgctgccgcacctgacttgagcatgacggagctttctcttcaatacttgctgtcacagccggccgtcgcttctgtcatcaccggagccagctcacttgagcagctgagagaaaactgttcggctgcagaggccaggcgtttaagcagccaggaaatcaaagccctgcaataccatacaaaacgggacgtatacgaagcccatcgttcttaaacaataaaaccggcaccttttcggatgccggtttatttatatttgtgccaatcgagactgctttcattcagcagctcttcaaagcttttatgtttttctttttcttttcgttttctgatttgttccgccttttgctgcgcctgttttttctcgtcttcttccttcagctcacttttcatttgcaaaagcctggccttcagatcttcctccagatcgtcttttaagctgtgtttttctttaggcagctgctttttcatcattacgccccccgtatctgaatatggtgaagcaagtgtaccacggagcgccggaggccggcaacgttcacggtcctgaatagccggaggaaggatttttcatatgaaaggagggtgcctgtgtgaaaaaatggctggcggtgttcggttcggcttgcgcagtctttttggctgccggattcgcttttacgaatctgattatgtttatgaagaaaaagacggatgaagatatcatgaaaaaagaaacggcggacgggcatgatagatttgattcctttcaggccatggaaaaagaagaggccgtcatcctgtcacgccacgggtatgagatcaaaggcttttacatcgccccgcatcatacggcaaacaccatgattatttgtcacggcgttaccgtaaattcgttcaattcattgaaatacatggatttatttttagatttaggctggaatgtgctcgtatatgaccaccgcaggcacggaaaaagcggcggcagaacgacgagctacggctattttgaaaaagatgatttggaagaagccgtgaattgggtgagacacaaaaccggagacggcggtcaaatcggcatccacggggaatcgatgggggcggtgacggccttattatacgcgggcgggcatcaggatgaaaacggcgctgatttttatattgcggactgtccgttcgcaagctttcgcgatcagctcgcctacaggctgaaacgggagttccggctgcctccgtggccgcttctgcctttggctgatttctttttgcggatgagagaaggctaccgtatccgtgatgtatctcctctatcggttatcagccgcatccggcagcccgtgctgtttattcacagtaaggaagatgattatataccctccgcttgttccgaattgctgcaccgcagaaaacgcggccctaagatgctctatctggccgaatcgggcgggcatgccatgtcgtacaccaaaaatccggagagctaccgtaaagccgttcaaacctttttagataccatgacgcaaacgtaaaaaagcgaaagaacgtatgctggttctttcgctttcccgtcataaaacgtcggtaatcccgtccatattttctccgatccagtcaatggcgaggtcgattgtcgtaaactcctgcgctttgaaggtcatctcatcttgaagcagccagacatccttctgaacggattcagcgcctccgatggaccagtgcagcagactgtacgggtggttgttgttcagaaaggatacccacgttttatgctgtgccgtctgtttaatggctttcagcttttgattcactttccgtttctccctgctttactaatatgctcattctcgggctcagcatctctgccgggctttttaagacgagcgtttttgccttttcattgtaatcgattgtcatttcctcgtcaaaaaacactttttgtgaggtctggatgtaaagcggaagtccgttggtttcaatggcttcgcattgtcccgttaattcgtccgccagccagatggtcggcacgccgctcaccgcgcacccgcagccttctgcgtcatagcggagctgcgcttttttccccgggttggcgtccatcgcctgctgaagtgtgtgtttcgccgcatccgtcacatgtatttgcatagatgatcctccgtttttcattttcgccattgtagcataccgagccgctgtatgcattgtttctgctttctttacagcagcccgctctcccagacctttgcctcttgttcagccgccttgatccagtcatttttcccttcactatactttgccatatcgtatgggtacgtcttagcgaggtgccgtttcagttccatgtattgagccgctttttcaggctttgcggtgaggtaatcccggaacagcagatgacgcttcacgtccggatggcctgtttcgtatatgtgaacgtggtgtgtgcgcttgttgccgcctttttgaaagaaacgccggccctctatcccgttttcccctttcgcctcatagccgagtgcttccagttgcggactgaatcggtcagcgtccgaaatatctttaacctccgccagtatatcgatgacgggtttggcggccatccctgggatagaggtgctgccgatgtggctgacagaatgaagtgctgggccgaagattcggatcaagtccgtcttctctctttcaaatatttctttccattccggcttgtacggaacaacttccgctttcctcttcggataaagatgaaaaaacgagagggtcagcccttccggcgtctctatctgtccggcttctgtgaaacctgtttttaaatagagagagactgccggaacgttttggctggcggtagccgcctctattttttgggcgtcccgattttgatctatcacaaattgaagaagcgcccgtccgattcctttccgaaagccggacgggtgcaccgtcagcctgcatatgacaaggtcatatccctttttttcatacgaaatgacgcctgcaagctgatctttttccttgaaaccggcaaacgtctcccgtgaccgctgtatatcatcgggtgtttcatgcagggcgggaatgccgaaaaagccgatcagctctgcttctttttgataagcgcagcgctgaaccgccgcaatttcccgcgcggtctgttcttgtgtatgctgtaaaaatgtaatcaatcttccgccccttttgacgcaaacatccgctgtgactccgtcttcgtaatgcggaccgcgtacgcttcataccaggcggtttttcctttttgttttgccgcctggtggtcagtatgatctttccaccttttaatcgcctccaggctgtcccagtaggaaaccgtgatgccgcagccgttttcctcccgaacgctttccgcgcctaaaaagcccggctgtccgcctgccaaattcatcatgcgctctgccgtatgttcatattcctcatcatattttccctttattgatgaaaaaatgaccgcataatagggcggtttgggcgtgtcagctaaaaaacccatattcaaccccctctacatatatttcacaaacagaatccggtcttctcccggaccgtcataattcgcaaaaacagggattccgtttacggttttggttcctttttcagcttcaaatcctaattttgtatgataagcgattgatactttattgacaggcgccgtcacgcaattgacttttgtgcaaccccttttcttcaccgtctccataaatcggtcgtagagctgttttccaatttgcatttttctgaaatccggatgcacaccggaaaaatgaatgtaggctgtctcagggtctgattgtgactgaaaaccgattaaaaaaccggtcattccctccggcccgtacgtgataaagcttgtgtcctgaaaatgttcaaaaaacaagcgcggcagtttgtctttcatctgcctgccgccccaccattcattcaaaacagacgtaaccatttcatagtcttcagaggtaattgttcgaatatccattatcgattgactctccttttcgtccggcaaaatgaatgtcagctcttctcattggaatataaaaaattatatgtgggttgtttgcaattgtaaatgatttcttttcaagcaaacgaatcagcacgtcttccagccggggaatgatttaccagtataaacgtgatcattgttcgggtacaatgaaaaacagaacaaatgttcccggaggtttttttatggctgatattcttcttgtagatatgcaatcgttttatgcgtctgtggaaaaagcggaagcgcctcatctcaaaagccggcccgtgattgtctcgggagatcccgaaagacgcagcggcgtcgtgcttgcggcttgtccgctcgccaaacgatacggcgtaaaaaatgccgaacggctgtgggaagcgcaggccaaatgtcccgatgccgttattgtccgtccgcggatgcagcggtatattgatgtatccgtcatgattaccgaactgtttgaacggtataccgatcttgtagaaccctactccatcgatgagcagtttctcgacgtgaccggaagcaggcggctgttcggtgatccttttacaattgccaaaagcattcagcaagcgattatgcgtgaattcggcatttatgcccgtgtcggcatcgggccgaataagacgctcgcgaaaatggcttgcgaccattttgccaaaaaaaacgcatccggcatccacagattggatatgtcaaatatcaggcaggatctgtggccgctgccggtcggaaaattattcggcatcggaaaacggatggagcatcatttaagacggatgggcatcagcacaatcggcgggcttgccggacaccccgccgaattgctgaaaaaacgctggggcattaacggcgaattgcttcagcggacagcccgcggcatcgatccctctccggtcaccgtcaacacgcacagccggcaaaaagcgatcggccataacatgaccctcccgagagactacagccgctttgaggatatcaaagtcgtgctgctggagttaagcgaagaagtggcccgccgcgcccgtttcaaacaatacatcggccatacggtttcggtcagcatcagaggcgctgattttgaattcccttcaggttttcacagacagagaaagctggtgtctccgactaatttcggaatggatatttttaaagcggcggtcaagctcttcaaagagcattggaacggtgagcccgtccgcagtgccggcgtctccctttcccagctggagccttgtgattatgttcagctgagcctgttcgatgcccaggaaaaaaagatcagtctcggcaaagtattggatgatattcatgagcggtacggccctgcgtcgctcctccatgccgcttcactgacagaggccggccaagcctttcaccgggctgaaaaaatcggcgggcattacaaataatttgaggtgatatacatgaatccgaacaaattaacacccgggtataatgtcatgtgggaatcaagccggatgatgctgcccgaacatcgggaacagctgcttgcgaaaaaacaaaaagaacgggaattccggcctccggaactgagcgaagagcaactgaacgacatgaaccgcatcattgcggcgtcgattgaagaagacagggccatctcggtcacctacgcttcagcacacggcccccgccggttttggggctgggtaaaacaagtgaggcatgacgaaaagcgtttaaaaatcataaacgatgaagatgcgttaacgctgccgtttcatcgtattctctcggctgaactggaataaaagcctaaatcgtccgacagaaaatatgatagaagagtgggaggatcacatgatatttagtagaataaagatgaatgacaagaataggagaatatatgatggatcaatttatagaaaaaatgctgggacaagccctccgccagtatggacggaatgtgtcgacagatccgctgagcccctatgaaaaacagagtttaaaaaaagctttagaagaaagaaggaatgaagaacccgatgaggatctccatgcccatgtagaagatattatctacgattacgtcaccaatcaggggcagttttcctgacacgacgtttatgcaccgggcgataagggaaatgtccgagagtaaacccttaaagattgcgtggtgcaggatatgcctgtcgggccttatttcaggatcggctatgccgttcttctgttatttctcatcatttatctcggaacattaatagactttttgttccagcctgttgtgattacggttaaaaccttatttccgcccattgtattatcgggcgtcctttattatttgtgccgcccgctcgtcagactgctgcatgcgaaattaaagttgcccgaaggaatcgcgattttagcgatttatgcgggaacagccggcctttttgtcctcttcctttatacggcgggccctgccgttcaaaaacagtttacagccttcacagatcatattccggagctttccgcaaaagctgaaaattggatcgggcatctccaggacagcaaatggttttcccggcttcagcatggggattcctttaaaaaattagcagacaaagccgcaaattattccggttcaatcgctgattctctcagcagcctggccggtacggctgccaatgccgccatcaccgcagccattattccgtttgcgctgtattacatgttaaaagaaggaaacaaagccccccggcgactgctgcggcttcttccggaaaaacatcaaaaagaaggaaaacaaatccttcgggacatggatgaagctctcagttcatacatacaaggacagctgctcgtcagtttctgtgtcggcgttctcgtcacaatcggctattttataatcgggctcgattatccgctcgttctgggcgcgttcgccatggtgacaaacctgattccgtttatcgggccttggatcggcacatttcccggagtcattgtcggattgttcgattcaccgaccgaggcggtgctggtgattacggtcgtcgtcattgtccagcagcttgaaagccagctgatttccccgcaaattatgggacggaagctggacattcacccgctgaccattatttttcttctgcttgccgccggcaaattctcaggaattgccgggatgcttctggccattccgggatatgcggccgcaaaagtggtcataagccacatgcagaaactattcattctcagaaaaaaaacaaagctaggagagaaatgattcatcccccatgtcttcacatcggtcaaaatgaaaaaacggcgggctgaagaagcccgccgcacacggaggtaaaaaagatgaacatcggtgatgtcatttttcaattgatttcatttattgcagccgcatttttcctgtttgccgtgatatacgtattcaaaagcttgaacaagcgccgcatacaattagacagaatcgaaaagaaactcgacgcgctgcgcgaagaaaaaaacgaaaagttatagttcattcagaagcaggcgcaacgagctccacttttatccgatccgggtcctccgtgtatacggcgtaatgcgtgcttccgcctgcatatggatggcggtccctgtaaagcacggggcatcctctggcaagcagcttttctgtcatctcgtcaacctgctctcttgatgcagcatgaaaagccagatggttcagcccgacccggcatctgtggtactccggtgttaaaaaacgctcctctgtctgtacaagcacaacataaaatcctgcgtttttccagctgatgccggagtcccaattttgaaattccctataaccgagctcacctaaaaaccatccccaaaaccgggcggaggctttcaagtcagatacatacaactcaatatgatgcatcataatattcgcttcctcctcacatcacacccgccttaccagcacctcttcaactttatggccatcaccttttctcaaaatcaaatccgatctgaattttgtcggcaggatattttcatacagattcggacggttgacgctctcccaaatggaggcggccatggtatccgcttctgcatcagacaaatccttaaatttatgaaaataagaagccggatcctgaaaagcggtttctcttaagaggcggaaacgctccaaataccacgtgaaaatccggctttcttcggcatccacatagatcgaaaaatcaaagaaatccgatacaaaaatccgcggatcttccctgtcgtcctctaaggtcggcgactgcaggacattgattccttcgataataacgatatccgcaccttcgacaacctcgacggcgccctcttccctgtcatacgtaagatgggaatatacgggcgcctccactctctctttccctgactttatatcgttcagaaattcaagcagcgctttcacgtcgtagctttccgggaatccctttctggacagaaggtttttcctttttaattccgccgtcggatacaagaaaccgtcggttgtcaccaggctcaccttcggcctgtcaggcagacgggaaagaagcttttgcaaaattctcgccgtcgtgcttttgccgacggcgacgctgcccgcgattccgatgataaacgggattttcgctgaatgcggatgcttcagaaacacattgacatgctgattccgtcttgcggcagacgtgacatgaagatggagcaggcgcacaagcggaatgtaaatcgtttccacttcttccaccgacaggtagtcattcagcccctctacggccttggcttcttcctctgaaacggcaatggaaagatggccgccgaatccggcccacgactcgcggctgtgctgcgtatacaatgtatgtaagttcaattctttacttttcacaattcacaccaatctctctgtatggctttccgataaaaaaacaaacgcttacaaagattgtaacggaaaaccgcttcactgtctgcccatttttttcaaaaatgaggaaccgatccggctgtactcttccatttcctcctccggaaccatgcttccgccggtgctccacacaaggtgcacggcattttccatctcaagcccccgctcttttatataacggtttccggcttcggtctgaacgaccttgacggccccggccagtccggcgagtgcagagggttcaaggctcttattctcggccgcccttaattgataaagcagcgaaaaaagcgtgccgtcatcggcggtataacagccgctgagtataggttccatcagagggccggccagtccggacggccttcccaccgcgagtccgtcggcggccgtttgattatcaagaccgatatcctgcacgctgattccgtcatgcaagccggaaaacagtcctaacagcatacacggtgaatgcgtcggctcaccgaaaaaaatatggacatgctcgccatagatcagctttagcgcaagcgcgacgccgcccgggcctcctccgaccccgcatggcaaataaacgaaaagcggttcatctgcatcaggctttatgttcatttgatcgagctgctttttcacacggcttcccgcaacggcataccccaaaaacagatcccgggaatgctcgtcatcaataaaataacaataagggtcctgcttcgcctgcatgcgcccctctttgacagccagactgtagtctgcttcatattcgatgacgcgaacccccttttcccggagcagctcctttttccactgctttgcgtcactggacatatgaacggtcacacaaaagccgagcttcgcgccgattatgccgatactcagacctaaattgcccgtagagccgacggctatagagtattttgagaaaaaagcggtaaaccgttcttcagtcaatatgctgtaatcgtcgtctgctgagagcattcccgcttttaccgcgagatcttcggcatgcttcagcacttcgtaaatcccgccgcgcgctttaatggaaccggaaatcggaagttcgtcgtcgcatttcaaaagcagacgcccggggaaagcctgagcggcgctgtgttccagacgctttttcatttcattaaccaagacaagcggagattcaatgaggcctccctccgcttccgtctccggaaaagccgacgcgatataaggcgcaaaccggcgcagcctttctcccgcttcggcaatctcctttttccattcagcgccatgctttactggatcatcggttttatgcggattgatccaaaatacttcacgcgcctccgccatttgcctgactagaggctctgccatcaatgccttgtgtatatcccggtcggacattcctttttcccccttgttactttttctttaatgcgcggccggccagtttttctgtaaacgatgggaaaagctgatacagcttcgtcccgaggctcatccatcgcggaagattcatttcccgtttatccgtcagaatcacggatgtaatgcgctctgccacatggtcggcatcaagcatccatctgccgacgcttttcacataaccgccctctttatctgcaattgtaaagaagtctgttttgatcggaccgggattaaccgttgtcacggctacacccgtaccggccagctcaagccgcagcgcattggaataccctaacacggcgtgcttcgttgcagaataaaggcttgatttcggcgtcgccaatttgccggcctgtgaagcgatattgataatatggccgcttttcgcatgaagcatcacaggaagacaggccttcgtacaggcgattaatccgaagacgttgacttcaaacattgccttcatatcatccaaagatgaatcagcggccgtttcaaaaatgccgaagccggcgttgttgattaatacgtcaacatgaccgatcaaacgccttacgttttcagcctcttctgcataccggacgtcaaacggaacgacatcacactgtccgccgcgcgcggtaatcgtctttttcacttcctgcaagcggtcctcccgcctggcggataaaaaaacatgagccccttctgccgcgcaagaatatgcaagccgttctccgagtccgccggatgctccggtgatccaaatccgcttatccgttaatctgctcatttccttcaccccttcacagctttaaacttcagagtgttccccgactgaaaggatacagccttcccttcggcggccagcacgtcaagatggccgatcgtttctgacatcgttaaaaacaattcattttcatacacagccggaaacagccgacggcatacctggaaagccgtcagtgtttcctctgacaacaggcgcagcacatattccgaccgatttctctgtttttcaagccgcctgtcaaaagcaggctttacgtctgtcagcagatcgccgtgtcccggatataaaaaggacgggtttacgtcatacagccgcttcattgagttcaagtagtcgagcatcggggccgcgcgcacgccccccttttccggagcttccagaatcggattggtggagctgttggacaaaagcagatcgccgctgaacatttcaccgcttttttcatggtagagcgcaatgtgagaagcggcatgacccgggatttcgagcaccgtccagccgttaagcccgtcaatttttccgccttccctcactgttttcgttaacggacggtttgcagaaaataagtatgacagcttaactgttttatgtatgtcttcaggcgtcagaggaacgcccatttcagtcataagcgacagaaaaaagtcctcctgccgggcgatatacgactggtcctgagtaatgtacctgtcattcagcgagtgccctattacttccgcatcatcggaaaaaaggtgcagcagacctgaatgatctgcgtgatgatgagtgagcaccacctgttctatatccgccgcagaaaccccgtgttccttaagctgaaatgagagcgattcagccgcttcctttgtattcgggccgcaatcaataagggttagggcttcatcttttactaaataaacgataacgtcgccgactgcaaacggagtcggcacacgtatcggaatgatctttctcgctgccatgtttacgctccttcgttcttttcattcctgaataatcatattttagcgttttcttttcactgtgtcattattgccgcatatcggaaaaaaagattgacatcccgctcttgcgcatagcataatgaacaacaaactagaaaacacggaacgcgatgacgaggaactagtatataaacaacggcagcagagagcaatgtccccggctgaaagacattgcggccctcttgtttacagaacctgccctcagagcggttaggaaaacctaaacgtatcccctcgttacgggatttgagctgagcacggctgattcgtgctaatgtaaggtggtaccgcgaaaccttttcgtcctttttgacgggaaggtttttttgtgttttgagaagaaggaggatttatatgaagaaaatcggttttatcggggccggatcaatggcggaagcaatggtgaacggactgctgcaaagcgggatgacagcccccggacatatatatatgacaaaccggtcaaatgacagccggcttgaagagctccaaaaaacgtacggagtgaaaccgtgccgggataaagaagagtttttcagcaataccgacattatcgttctcgcctttaaaccgaaagatgcggcagaaagcattgagaacattcgcgaatacgtgaaagatcagcttgtgatttctgtcatcgcagggctgacgattcacacgattcagcaatatttcggcagaaagctcaccatcatccgggcgatgccgaatacatccgcggccattcagcaatcggcgaccggtttttccgcaagctccgaggcgagtgaagctgaaatccggacggcaaaagagcttctggaaacaatcggagaagcgacgcgctttgaagaaaaacaccttgatgccgtcacagccattgccggaagcggtcccgcctatgtgtaccggtatgtcgaagcaatggaaaaggccgcccttcaagccggcctgccggaagaaacggcaaaagagctgattttacaaaccatggccggggcgacggaaatgcttagaacaagcagcaaacggcctgaacgcctgcgcaaggaaatcacaagcccgggcggcacgactgaagcaggccttcgcgcattagaagagcgccgctttgaagaagccatcatgcactgcatcgcagaaaccgcagcccggagcgccgaaattaaagaacaattcgcaggctccgttctgcaaaagacggaccagtgataaagcatggggcttcccatgcttttttcattctgtttaactgccgtataagcggctgattctctcttttacttcaggaagatggaatgtggcttcgtgcatgttcacctcttcctcaaccgcttttgtcagctctcgtttgatccgtgcggtcacattggttttcagcgcaaccagtgaggctcttggtttatccgccagcagccgggccaattcgcggcctctttgaaggacatcttttttcggcagcacttcaaacggaactccccgtttttccagagcggcgccgctgaaattcgcggcagtaaacagcatttcttccccgaggacaattcccagtttttcaggcacaatatacgtcgcgcccattcccggtgtaaatccgtacttcatataattacaagaataaaaactctctctgcttaaaatcacaaaatccgagctcagaccgatcgtaaagccggctccgatcgcatgcccctgcatggcggaaatcacagggatcctgcaatccaataaaagactgtgaagctttaaatctgtaaattggagctttccgctctgaatggtcaaaagcccctcctgcgttcctcccgtgcagaaataatttccgtaacccgtcagaaggacggttttataggacggatgggcattgatgtcttggaatacccggtgcagctctctgacaaactcttctgacagcccgtttttcccggccgtatcctgcattgtgacctgcacaatgcccggttctgtttcctgtacatcaatcattggattcatgtttattctccgtttctttaaaaatactcaagcctttccggctctgagtgtttctgacactaggtcgtccattcatactttctgtgaaactcttttatttcagtcagcaccaatcgcgtttttccttgatgcgcattcgggatgtctgctgcgggcgcggcatttcttgtgccgaattttacgataccgctgtcttggagcagccggtcgtaatcagccatcgataaacggacgcgttcatccaaatgccggctgatctgaaattgattctgccgcgtacggctttgcggcataacgacaccgctgtaaaattcagagcagcagcccgaaccgtatgaaaaacagccgacgcgtttcggcgtttcaaaagagccgttatcaatcgtgctggcaagagataaaaatacggtggcccccatgatgttgccgacgcgctgacagtattgaatcccaggcagcacgcgttgctgaaaatccgcttcaatgtcttgcggcttagcctttgccaattttctcatcatcgtccgatgcgctccttttaccattccgccaaacggagtatgaaaagaaaggtattgaaatgtattcttataatccgccccgcttacacgctttctgtattcctgaaatgatttttcacagcagtccaaataagacatgagcgacagatcagcatcccccgcttcactatccgggatcgggcggcacgtatccatgacttcatacccgtaatacccgcttgcgccttgatcaagcaaaaagacatgaggggtgctgctgactaaaagcgccacagctcccgcccccgcactcggttcggcataggaccattcctccgtcaacgcgtcaccgccttcagccactaaaaagcgggaaatatccgttccgatgatgagcgctttcgctcccggcgatgtttgcgataagatgaaattcacgcccatttgaaatccggccgttaaagaatagcaagcctgtttcacctcaaataaccggcaattccgcttcagctgcaaataatcatggacgtatgtactgatggatttgccaaaatcaatcccggattccgtacaggtgatgaccatttcaatctgattccgttcctcttctgacagagagtcgataattggttttgcggcatttacggcgaacgtaatcggatcttcaaacggaagcgccaccactttttctttcatcagcaggttctcaaacctttttttatccaggttccgatgttccgcaagctccatgacgtctacatacgctgttccgccaaacacgttcattgcttcgattcctacattcatttctccaagcccccagagtaaagaggcttcctgtggaagcctcttttattttttcgctcaaaactcaacaagcagcctgtcaacgccgtgaaatacagggctcggaaccagattcggctcttgatcctcagtaaaacgccatgcgggcacctgttcaaaaaagtgggaaagcgcgattttcgcttcaagccgggccagcggcgctcctaaacaataatggctgccctgaccgaatgacagatgctgattcggctttcgtcccaagtcaatttgatcggcattttcaaacttcttttcatctctgttcgccgatccaatccacgcatacactttttctccggccggaatcgtttttccgccaatctcgctctcaaccgcggtgtagcgggttacccgctgaatggaaggtctgaggcggatgacttcctcaataaagtcaggaaggagcgccttgttttcaagcagccggggcagaatgtgcgggaactccttgagactgagaaatgaatttccgatcacattttccgtcgttacgtgccccgcgacgatcaacaagccgcaaaaaccgattaattgcttgtctgacagcggctctccgtctaaatcagctgaaattaaatggctgattaaatcattttgcggctgttttctccgctgtaaaataaactgcatgaagtatccgatcatctgcttttgcacttcattcattttcttttcatcttttacattctggctttggtcgacccagcctttaaagatatctctgtctttcggaggaaatcctaaaagctctgcgatcacgataatcggaagcggaaatgcgtaatcttcaataatgtccatcctgtcttttgaacggacggcctgaagcaggtcatcagcgatagcggctatacgcggtgcaagagtctcaaccgatttcggcatgaacggctgattgaccaattttctgaagacggtgtgttcaggcgggtccattttcaaaaggctgtctttgttaatatgccgaatcattttttcctgtttgtccgcacttaagtatttatgatcggaagaaaaatgactgtagtcagaaatcacccgcttcacttcatcataggtgaagatttcccagcaatcttccttttcattgtaatgaacgggagaggtttctctcatcgtttggtaccacttgtacggctgctgctgtctgatttttgttaaactggtcattttcattcctccaagatgtgatcaagatttgaaatgacccgccgaagcttacgagtaacccggcgggcggatatgtgaaattacggtcttgttttggcgggctgcttcagcatctcaccatgcacattcagtatcttttcctgcagctgcagaaagctgtattctgtcattccgtctgccgaatataaaacgccgcaaaattcagaaatcgtttcggctgtgctgtcttctgccaataacgtcatatggttggataccgccacatccatgatggcgatgtttgtcatatgctcttcccactggctccaatagttgacgaaatcagcggataaaatatcagccctgatcgtaaaatacggatcaagctcacccaagaaaataccgtttttatttcggaaataatagcatgtcaccccgttcggatccggaagcggcaggagttcgtaatcagtgatttcgtaagcgtcctgaacgtttatattctgcctgatcagatttttcaccaacgcgtccgtcttcgttaacccccgctgtttggcttttgcgattaattgctctaaaaatatgtcttcatgaagatcggcattcagttcatcacgatgaatcaaggtttcagaaatgcgttccggatgttgatagattggtgcaaataaagccatgttcaccgtctgcagcatcatatttttatcaaataattcatcaggaatgtttatttcccgcgcacccgctgagtcaaaggagtcgagcatgacgattgactcaacggtttctccagccagctgcaattgccgggtgacttcataagcgagcatgccccctaatgaatagccgcctacatcgtaaggaccccggggctgcacggtacgtatgagcttaacgtaatattcggccatgtttttaatgccgcggatcggttcccggtctgtcatccaccctcttgcctgaattccgtaaaaaggacgcccggtccgttcggcaacaggctggtacagctccactgcccccagcgcggaatgaaaccagaaaatcggtcttccctttccacccgggttaagacagatcagctcgggcggttcttgatcatctgtctcttctgatatatcgttttgtttcgtatgttccccatgtacttcctcggtgtctttttggacagaaccggtcagatacccggctaatgttgcgattgtcggatattcatagaccagatttgccgtaatagacgcttgataggttttattaatggactgaacccattccacaccgataatagaatccagccccatctcaatgaatgcctcatgctcatcaatatcttccggcttcagaaacaggatgtccgcaaggctttctttgagctctttgcgcaaagtgccgtcagagatgccggcaaggggagtttctgcttccgggatttgcggacgtaccgctgtttcctccgcttcagcatactcgggtttctttatttgtcccgctatatattccgcaagctcttcaagcgtcgggtgttcatacaccttattggcagtaatctcagtgtggtacgttttatttactgtttgtatccattcaaccccgataatggagtcaagacccatgtcgatgaaaggctcatcagcatcaatatcttccggtgacaaaaataaaatatctgccaggcttatcctcaattcttcaagcaatgttctattgtcttcggaaacggctttttctggctgctggacagaaacagtacaatccaaaggctgtaacacgattggcttttgcaatgtctccggttcaaacgctgtcatttcgatctcagttaaaggactcagagaaatcagcccttcatgttcaggctgtggcgaagacgggagaacggtttgcgtttcagactttttcatggtctgtcctggtaaagaactgtttacatcagccgcccaatacctttcttttaaaaacgggtaggcaggcagcggcgttttataatattgtcctccgtcaaaaagccgtgtaaaaggaagatcataccctctgcaaaaaaggtcagcgatatgtgccaggttttctctgtactgtgcgggcgaagccgccgagcggcactgttcaatgcattccattccgaatgttttcattccggcttcttctgccggcttctgatccttcaaattggacacaaacacacccggaagctctctttttacaagccactccgataatacccgcttcagttcgtccgcactgctgacgatacaggcaaaccggtgatgtaaatgctttctgccgagcaggagcgtataacttatatttcccagatcgctgtctttgttcttgctgagtgaatccagcaggcgttctgcctgaatttccagctgacgctccgtccgcgcagataaaggaatgaggcaggctggttttgccggcgaccggcgcacggtttgcggcgcctcttcaatcacaagatgggcatttgttccgctgaatccgaatgaactgatggcggctctgcgcggtgcatccggattccgttcccacggtatcagcttttcattcacaaaaaacgggctgtccgcaaattgaatatgctgattggcttgatgaaaatgcagggaagccggaatctgccgatgcttcagcgacagcaggattttaaacagtccggccatccccgcggccgcagcggcatgtccgagattggttttcacagagccgatggcgcaatatccttttttatccgtatagcggcggaaagcgcgcgttaaggcgccgaattcgatcgggtcgcccagtgcagtgcccgttccgtgagcttccaccatttgaatggtttccggatcaatgtgaaaagtatcatagacatgacgttccaatcgttcttgagaaagcgcgcttggagcggtgattccgtttgtagcgccgtcctgattcattgcagatccttttatgacgccgtacacatgatctccgtcactaacggcgtcgctaagacgtttcagcaccaccgctcccacgccttcaccaggcacgaacccgtccgcgctttgatcaaacgtatggcagcgtccggtcggtgacagcatattcgccttatttgacgactgataaaaagcgggagtggattgaatgaaaaccccgcccgccaccgccatttccgtttctttcgtccagagcccctgacatgccaaatgaatggctgtcagcgaactggaacatgccgtatcaacagtgatcgccggcccttgtaaattaaggtgataggcgatccttgccggagtgacggaattatgattgccccaaaacgcctgcgcgggcccctgctgtttaaaaatggcctggtaatctccgccgcaggagccggcatacacgccgcattcccggcctcttaccgagtctcccgcatatcccgcatcttcaagcgctttccatgattcttccaaaaacagcctctgctgagggtccatataggtcgcttcacgtcccgatatatgaaagaaaacggggtcaaaacattcaatgtcctctataaaactgccatactggcattggctgtaagagatatcccatctgtctgcttttttaatcagatcccgtccggcggctaagtgttcccaaaactcatggagattctccgattcagcaaaccgcccgctcatcccgataatcgcgatcggttctttttcaggtaacacagctgctgattttactgtatcggccggatccttttgttcggggcggtacgtcatttgatacggttcagaaacgctgatgacgattttcccgatatttccgcggtcatccagacagtgatacgcttcttttatgtcttcaaaggaaaagatttttgagatgacaggctgaatgactccctcttccgccagccgctgcagttccaattgatagtccttgacctgatccggattttgaagggacagcttccgcaaatccacgctgtgaaacgattgattgttatgaaggacggacaagtcgactgatttagcggatttcagcgcagtcatggcaatttcgatatatcttccgcccggcgccaggcaattcattcctttttgcaaggcatcaccggccagggtattaatgacaacatccaccccccggccgccggtcattcgcatgatttccgtttcaaaatcttcttctaaatagcaaatggtattgcggaccccgagcgaatgcaaatactcaatttttctctgtgatccggccgtggcatatatttccgcgccgatatgccgggccatttgcaccgcgatcagccccgttcctcccgtcgcggtctgaattaatattttttcgccttttttaagtccggctttccggaaggcgtctatcattgtcaccgccacggtgggaagagcgcatgcttcttcaaaggtcagccgggccggtttatgatagacttgatgttctttacatgtgatgagattcgcctgagatccaaattcctctcccatgccgacaatcacttcatcacctggaatgacggatgttacatgcctccctgtcttgatcacgacgccgcttgcttcaaatcccggtgtgaacggataaggcggcatcgtcgggtacagccctctgacacaaagcaagtctccgaagtttaaagaaaaggcgcggacggctatttgaacctcgtcatcttttgtctcgggcacttcactgcgggcaatcgtcagatcttcaatgccgcccggacggtcaatcacaacccggaacattcccgagtcatcggactttgcgaaagaaggcggcatacgttcttgtttcggtttctgataaccgttttcctttctttccgtctgcagaggtttttcagcaggccgttcttcctgaagcgccgggcggattttcgctctttcggccttcagagacgaggctatgatggtttcgtattcttccgagatataacgggtcagcagtttcacatgatagtaatcaaataaaatcgttgtctgcagtgtaagattcaatcgcttattaatctcgttaatcacattgacggccagaatggaatcaatgccgtattcagagaaattcagttcttcctgaatatcctcttctttcatttttaatacatcggcaatacttgttttgatgactgagcggacatgggaagcgaccgattccccatcagccttaacagcttgatgctcctctggcgtgcggctgcgggaaacaggctgcgcgggctttcggaaaacttcggccggggcggcgtatggctttctgccgtctctgatcccttgcatccggacgagtccgtcactctcagctgcgataatctgctggcctaaatcatgagccgtttcagcagggaagcagaccgctctgtatccttccgaatgcagcacacgctcccacgattttggatataagccgggacttcccggaatccgaagctcagcatcctcataggaccaccagccgtcaagcagcccgaaggttaaatgggtaaaaacagaacgatcgctgatttcgtttatcaaaatcatcccgttgtatttcaggagcgctttcagacggcgcagtgtcaaaccgatatttcttgtggcgtgaagcacattggcggcgatgacaatatcgtaaacacccgttttgatattttgtgattcgcaaggctcctccgcattaaacaaggctgttgtcaaatacggcacatcaggtccgtattcctgttcggcatgcattaaaaaagctttagaaacgtccgtataacaatattccgcaatctgttttgcaaatggtttcagttttgtaaacagcatggcgctcgttccgcccgtcccggcccctacttctatcagcctgatacgggcatcggggtgttctgtaagataggctttcaggtaagcggccgcggaatctgctaacacttcattaaaataatccgcgacaggattatgcttataaacaccttcaacgagccgcattgatgaatcgggaaatacgatatccgtagccggacgttctccttttaaaatggaaggcatcgcttttatcgtcgcctcggccaattcagcttgcgcaagctccccattgggaagcaggcgtttatgggcattccactcattccagactgtgcggccgtccgggcgctgatccgtgagaagagtgatcgtgtatccgtcatacgcgatatatccgttttcttttaatagattcaagctttcttccagccatctgccgtatgtgccgatcacgccggcgctccgcatggatgctgcaggtgtggtgacaggctcgctgaaaaacccgattgactgtaattggtaaaagagcagtttgcaaagaaggctgttcatatgcgcaactccatttctcgttttaaagtctcaagccggtcattccgatccggattttgccgcttgacgctttccataaatgaaggcttcgggccggatacaaccgatattgcatcttgatccgtcagcgcggctaagccgtgcggagcagctttgatgaataccgcttggctgaacggttctgatagtaagacttccagcgcctccattgcttcatcgggttcaatagaaccgatccctgacgcctccatccgttttctgtaagacgggtctgatacaacacccagactgccccaatatccccaattcatgactttcacttcacaatcaagcaaggaagcgatatggcgggcaaaggcgtcttgaaatgtacaccctgccgcatagttgctttgcccggcattttttgtgaaagaattaacggatgagaaaaacagcacaaaatcaagcggttctcccttaaaagcttcgatcattcggacgctcgtattcaccttagctgaataagcgtttctgaaagaagcttcatccatattcgccatacttttgtcggcaagcgttatcgcggaatggatgactcccgttatattgccgtattgctctcttacggaacggacggccgctttaagcgctgcggcatcttgagcatcagcctgtatataatgcggcgcggggcctgatagcgccagcctgtctattttgctctgaatctcctgatccttaggccgcctgccgatccatatcatccgtgccttgtaacgggtgatcatgtatttgctccatgcttctccgatgccgcccgctccgccgatgacagcataaacgccgccttctctgtacgacatacgcggagcggaacttgtcagcacccggactgttttttgcttgtgccaagctccgttacggtacgcggcagcatttccgtccggatctggaggaaggcgccagatgtttttcatctcagacgaatcactgccttcttccgcatcaatcagcctgatgtcccagttcggatattcttttgccaatgaaccgatcaaaccgtgtacgcctgcatgctcaggctgcggcagatcacccggatacacggactgtgtctgccgggtcaccgccgtaaagctgatgtttcggtttccatacccgagtgacagcagcgctttgatgaaacggaaacattgaatcaccccattctcctgctcatcaagcatttcctgactgacggatgcgggtgcgaaacgatccggcgcaatccataagaaatggcggatatcctgatacccggctgtcaattcacgtaatgtttgctcgcttgaatgatccggcgtctccgccagatgggcgcggggccacatttttgccgcagcctttattgtatttcccggctttccgatgatcagcatttgttcttgatcaaccgctcgattttcttccagagaaaagaaagttttatcccaaataggggcaagcatcgccgtctgaacttcctgccgtttgctttcggtttggtttgtctgccggacagcccggcaggagaagcctgttaacctcatacaaacagcgccgttttcatcacataaatcaatatccagcgtcagcgctccattatctgaccgatcgctctgtttgcggacaagcgcccacatcgttttctgagtcggctgaaatatttctgcctgccgcagggaaaacggcagcatcggagtgtctccggcagtatctgaaccggcacccagtgacgcctgaaacgcggcatctaaaagactcggatggatgacaaactgatcggcggtactgtctgccgtttccggcagcgacagccgggctgcagcacccctctctccgatcatcagctgatcaattccttgatggctcggcccgtatatcatacccgcatgccggaaagcctgataaacctcatcagacgtcataaccgattggctgcagccggacagccagccctctaagtgaactgacggaaccgctgctatctctcctgataccgcggtgcctttactgtatataatccgttctcccccgggttcttccgataggctgtaaatcgtaaattcaatgtcttcatttcccttaaggataaggctgatatggacttctacatccgtccccttatgaacgacaggcctcatccatatgagatctttcaaatacagtcctatacgtccgtccgccacagcgtatgcggcacgctcaacggccgccctggccatttcgatcacagcggctcccgggagcaccttctccccattgactgtgtggtcagtgaaaaagaattcccgtccggtaaaaacagaggtgaatttcagctcccacagatcggatgtgttttcatgaagcagcggatggatcaccgttttgccgtcattccgttttgaaaccgcctcggcttcatcttgaatccagcatctgacctttgcaaacggataggcgggaaggctgattctccggggtttttgtcccgaatataacaagttccagtccacatcgactccctgcacccacatgttcagcaaatgaccgtactttctctttttcagccatttgaccatggcttcctgcaaatcttcatcagattcaaacacagccactgtctcatgatttcgcttcgcccgccccctgtaaagatgcggtgcgttttcattttccaagtacgatctgagcttgtcctccagctccttaagagagtccgcaatgagagccagccgctcatccatcgcttcccgccccgcttgtaaagtgtatgcgacatcaaataagtccggcttatccgtatgcttcttttgaagaaaagcaaggaggcgctccgcatattctgtcagacgctccccatttttcgcagacagcagaatgacagccggctcttggctgctgattgcttgtttgacaggagcctcatattcttcaataatgatatgcgcgttagaaccgcccgcaccaaagctgctgatccccgccctgagcggctgttctgctccgtctgctgaaatccgtttccaatctgttaattcccggcagacggaaaacggcccttcatcaaattggatattcggatttaaaacatccgcatgcaaagatggggcgatttgtttgtgcttcatctgcagcagcacttttgtgacagcggcgatgcccgctgcagattccccatgtccgatatttgatttgacagacccgatgagacatgtttcaggaacatcaccgaatgcatcggttaaagcccggatttcaatcggatcgcctaatttcgtccctgtcccgtgcgcttccacatagctgatctggcccggagatacccccgcctcctgtaaagcttgagaaatgacttcgctttgcgccttggggttcggtacggtgtaaccgctcgctcttccgccgtgattaatggcagctcccttaatgacgccgtaaatacgatctccgtcttgtacggcgtcttctaaacgtttaagaagcagcaccccgaccccttctgccggaatatagccgtcacccccggcgccgaaactcccgcagtgtcctttagatgagatgaactgcccctggctcagcatgaagtacttgttaggatgaacggtgagattcactccgccggcaagcgccgcgcgaatccgatgatcccgcagatcccggcacgccatgtacaatgaagtcagcgaacccgaacacatcgtatcgaccgaaatgctcggcccttgaaaatcacaaaaataggagacacggttagcaatggatgaaatcccgccggggagcccgatatgccgtcctttcactcccgcttcagccgcgaatagcgggtattcctgatacatgacaccggcatacacacctacctgacggccaagttcaggtgatgtcctcgtatatcccgcatcctccatggccatccacgcatgcattaaaaacagccgttcctgaggatcaaggtgttccgcttcacggggggaaatcttaaagaactcaggatcaaaatcggcgatcccgtcaatgaatccgccccatttgctgtagatcgctcccggcgccgtccggtcctcggaaaagtaatgttcccatttccagcggtctttcggaatttcggtaatacaatcctttccttgtttgagattttcccaaaacgcattgatatcatcggcctgcggatacttgccggaaatcccgacaatggcaatatccagcggttttcctttcgttttcggacggttttgattcccggacggggcaaaagacgcattttcaagccgatttggctgaagcacttctttcacagacgcgtttttcaattccgccagctgttccccggtatgactgaggactgcggcatcaaatgagagaaacccgtcttttttatgtttgattgtattcaccacataggcggtatcagacatgactggtccgtaaagcgtcagcctctcaatcatgagcgggacgtgaatccgctttttcagctgcaattcttcttcaccgagcgacatataacaagaattcaatataagcgggtcaaatgcaaagtgacgcagatcgcctttttctttttttcctgataagtccagctgcaataaaaaggagctctcactcattttgtatcccgccgttgccgttttcagcatcgggcctatcgtgaagccggcaaccgaatcgtacagacgggaaataacatccggcgctaccttttgtgcatgcgccttcatttgttcaacgtcatacgatttttttacgggtgcctctatacctctgcttatttctccttcggcacacgtcttccggctttctttaccggagacagtgcagcttgcggtaaagcgttcggcactcttttctgccgcaaatgaaatgtcaatctgtgcggcctctcccggctccagcgtgacgggcccgcccgtaaagcggatatctttcagctcggcgggatacgtgccggaatgagacgctccggatgcttcaagcaccagacacggatacactacacccatcagtgccggtttgccgaaaaccagatgatccttaaggaatgcttcatgttcatagaaagtaaatgtctgactgactgattgcgtttcagagaccggtgctgcatccgcgacaaggccggaagattcacctgttccttttgtttttatgtcttcaagcagttcggatatgctgctgcactcaaataaaagagtcggattcagccgcagatcaaacgccccttcgatgtctttaataatggccagaagctgtgacgattcaaggcctaattcaaaaaatacggtgtgcgcatcatttcttgtgacaggacggcctacgtatgttgagaaaatgcggtataaggtttcctccatctgctgaacgcctggtatcagctgccggtctgtccgcacctttttggctgtcaggccgagcagtgaagcaatatgcgcaccgctgaggttgtaaaagtcaatatccattttcaccatttcagaaggcgtgccggattttttcaaaatcaccgcgtaacagcgctccgtaacggtttcagcggcactaaacgaatcataataaatcggtaaaaacaaaccggcgcctgcagctgtctgcaatacgccggaggccatggcggcaccgtccatcagcgcgggatgaaagagagcgccggggagattttcctggcatgaatcagactgccgaatatcaaggaaacattcctcttcatttgcatagatctctccctccggcttcatcagcccgtcatgcaacagtccgcggcttctcgcgccttcgtaaaccgtatgcaaggagactgatggaagcgcaacttgttttttctcttccgcgtcaaggcgcttatctgatgagaaaaccccttcatgcacctccgctgataagaaaaccgtcccggaatccgccccgcaaatcgaggcagtccagaactccttttctttactgaatatgacactcacatcaagccgctctgaccgcttcactgataaaggatgataaatggtcacccgtttcagacagatggaacggaatgaaagatcaaggctttgctttgccagctgatacagcatatcaatataggccagaccgggcatgacagattctccgtgaacaagatggtttttcataatgggatgttctgccgtcaggcgcagattcactgtttttttcatggttagtccccttttaaaaacgtcacgttgtcacctgccaaaacgagtctgcaggtgcagtgcttgtctctgcttttttctcatatttctttaaaagatccgcaatgtctgttttttcattacttgttttttccgcttcattctccgtgctgttccagccgcccaaaagcgggtagtgtttttttctgaattccggcggctgaggcgccaggtgatgttccccctgcctttcacctctgtattcttcaacgaggatatgagcatttgtcccgccgtcaggaaatgaactctgagctgcgacgcggggtttcttctctgaatgccaatcaatgggttcacgattaaaatgaatacgcgacgcttcaaagtcataatgttcaaatggctcacgcgctgataagaaaggcggaatccgcttatgatagacgctcagcacacatcggatgaagcccgcaagacctgaagacagaagcaaatgccccacattcggtttcaccgatccgatccggcagggcagaagcgttttccggttcagctgatagacatctgagagcgccttgatttccaccgaatcaacgattggggaaccgcctccgttcacttctatatatccaatgtcttcgggcgacttttccgccatgtcaagcgcagtttgaacggcgtctctctgcgctcttatattcggtgaaccgggaccgagcgtccggccgtcattgtttaccgagacggcttttatgacgccgtaaatacggtctccgtcccgcaccgcatcgctcaatcgtttgataaaaaccgcccccgctccttctccgagcacttctcccgctgattcacggtcgaatatatgaaacacgccgttctcatttaaaatatggcgcgctccgaataaccggtgcgcggacggagataagagcagactcaccgaaccgactaaggccgcgtcaatccttccggccaaaagggcgtcttttgcaaaggacagcccgatcagccctgaggaacatgctgtatccacgacaaggctcggccctgtgacattcaaaaatcgtgaaatgttggccgctaaatagttttgccccgcccccaaaatcgggttaggcgcctgcaggatatgttccataccggctgaaggctgcgccctgccgccgatgtacacgccgactttccggcccgataaatccttttggccgtacccggcatcataaacggaatgaaccgcttcttctaatatgatccgcgcctgcgggtccataattgccgcgtctttttcagagatgccgaaaaagcccgcatcaaacatgtcgatatcatcaatccaccccgcataatcctttgcatttgctgttgcatgccagcgcgttgcggggacaggccggatggcggtgtttcctttcatcagcagctcccaaaaagcatccgttccgcccgcccccggaaaacggcaggacatgccgacgacggcaatatcgtcttcagtatccgctttcggctccatgaatgttctctcttcagcgtcagcgattaaatcaggctctacgtccctgtcttgaacgaaaccattttcttttgtcacaaaatcggcttcatgatgcgctgcgaaatagtcaaccatttctgtaatcgtttgatattgaagcattaaggacggtgttaactttatgctgatccgtttttgcaatgattgaaccaattccgcaaagagtattgagtcaatcccgtattcatcaaacggcatatcatcttttatctgctcatccgtcattttcagttcttcgctgaaaacggtgcgcacccattgacgaatcatatccttcaccttttggtcaccggcagtgctttttttcacgggagcttcagatttcttcaccttcagaagatcaccaaaatcaggctcactgtcttcgggaacacaaggaattccgcagctttgtccgtttaagatgatgtaatctaaaaacttcagtccgtcttcggcagacagcctggaaagtcctgatttttgataagcaggtgtttccggcaggccttcagccatgccggtttctttccagacgggccattgaacggctttaacaaacacgtttcctttacctgcttgatgatttgcaaaagagtccataaatgaattagccatcgcgtagtcactttgccccgcagcaagcgaagggatcagacccgaaacggatgagaacaaaataaaaaacgacagcggctcattctgaacagcttcatagagaccgcgaagccctgttactttcggtgtgcaaacgctttcgatttcagtttcggttttgttataaaaagcggggtgttctcccattgcgcccgcgcaatgaaaaacgccggtaatcggccccatcgtgccgctgatgctgtccgtcattttccggagccccttttgatccgtaagagaaacgctgtaataacggatctccgcgccccgctcggctaacctctgcatccgctcggctttttccgggagaatgccgtcctttttcatgtctgcccactctgaggaatcgggaagctgctcccgccccatgatgaccagtttcctgcagccgcgtgaaacggcatgctccgccgcaattgcgccgatcccgcgcgatccgcccgttattaacagcacatcatcagacgaataggaaagctcaggcgccgccgaaacattcataccctgcttcagaaacggcacataacggcgattcagcctgtagcagcattcactgacgcttttggcccgcggctgtaaaaattcagtctcaatctgtctgcttaattcttctgtatgctcaatctcacaatcgctatctatcgtaaaagaatgaatgttggcatactcagcgcccagcatccggtacagccccgccgttttcgccccttgcatcagaggtttactttccttgaaaggctggaggcggtgtgtcacttggctgaacacagcgccgctatgacggaatgattccagagcctgctgtaaaaaggcaagctttccgtgttctatctcttcctgccgttcatattcagcgtcatatgcggttatgtcgacgaccccgagtgtctgtttgttttgaagagactcccgcactctgccgtaaaggtttcgccccgatgcggcggcgtaataatcagcgccgtcttttgcctgatggatgaagcagatcgtttcaatatggccgtttcctttaaaaagagcatcggccaatcggctcgtcttatcagttgcaagtatcattactgttcctgataatgcttcagattccgccggatcttgctgcttccagtctttttgaagaatgatcttttggttttccgccggttcgtctgtctgtttccggatatccgcaggcacaggcacccaataccgctccttcgcgaacggatatacaggaaggctgacccgtttcggcttctctccttcgtataacaggctccagttaacggcggctccttttgcccactcagtgagcaatctggaatattgctggtttttcaacagctcggccattccacttgatgaaatatcatcttgagcacgtccccggaaacatccttcaatttctgttttccgttcaagcacatccttcagtttcgcttgcaggccgcaaacggatgtaacgatcaatgccagccgttcaggcatcgcttctctgccagcttgaagcgtgtaggccaggtctttaaggttgacttctttttcccgtaaaaagcggtcataccgtttgacatattctaataggcgatcttcattttttgccgaaagcagaaacagaaccggctcgtcttcccgtatatttaccgatttcttttcagcctgcagcggcagatattcttctatgacaaaatgggcattgctcccgctggcgccaaaagaacttaaacccgctcttctcggctggtcaggatgtgacggccgttcccattcttccagccggtccgccacataaaacggcgtgtccggaaacggaatatggggattcagcgtgtccgcgtgcaatgacggaaagatttctccatgcttcagctgcaaaagcacctttgttaatccggcgatcccggctgctccttctaaatggccgatatttgatttggcagagccgatggcgcaaaaccgcttcttgtttgtccatttgcggaaagcgcggctcagcccttcaatttcaatcggatcacccaaagacgtgcctgttccgtgggcttcaatatagctcagtgtctccggatcaatgccggcactctgaaaagaatctgtaatgacttccgcctgtgatgccggatcaggcacggtcaaaccggatgtttttccgacatggtttaaagcggagccttttatgacgccatatatcggacagcccattctttccgcttcttgaacggttgtcagtaacaccgcgccgacgccttctcccggcacataaccgtcaccgccgtcggcgaagcttttgcagacgccttctgaagacagaaatccggcattcgccaaaaacgcatatttatgcgggtgtgtgaccgcattcacaccgccggcaagggcgaattcgcactcccctcttttaatgctttcacatgccaaatgtatggatgtgagcgaagaagagcacatcgtatcaacagccattgacggtcccgtaaagttcaggcagtgagacacgatattcggaacagaggcaggcgtcacgcccatagacagcggtgtaccccgctgtgtgatttcagccccgaacagctcataatggctccaaaacacacctgcgaataccccgacgcgttttctcttttgcgaagatggcccgcgcgccgttctgtcctgataaaaaccggcatcttcacaagcttcccaagccgtctctaaaaacagccgtgcctgcgggtccatcatttcagcctggcgaggagtcagattgaaaaacagcggatcaaagctgtctatgcgatctaaaaatcctccgtaacggtagaactgatctgcttcatatgagaaaggataacctttccatctgtctttcggcattgttgtgatgcaatctttccctgagcgcagattttggtaaaattcatcaatgcttcccgcctgcgggtatcttcccgccaatccgattaccgcaatatcgtgctcttctgtatgtctctcttgtttttggctccttctctttacagctgcatgggataatgaagagcggttcttgtctgccatcggaaccaatcgggccatgctttcagttacagccggctccttcccgtataaaataacagattgcagcttgccgagacgcagcatatattcaagtgaagccatcccttccccggccggaagcgggctggtgcccgttgcatcattcatgatctctttcatcaagctgtcaacctgcatgccgccatcttcccaaagcggccagttgattgttatagaagccccggtccgttcgcctttttccgctttgcaatcgcgatatttcatatattcatccataaaagcgttcgccgcggcataatctgtctggcccgcatttccggccaacgccgagaatgaggaaaatacggcgaaaaattcaagcggttcatgccgtgaagcttcgtccgcatgaatcaggccgctgattttcggcaggaacacctgcttcaagtcagaactgtctttttggatgataaattgatcttttaaaacaccggcgcaatgaaaaatgcccgtcagccggccgaaggtttctgtaatctgagcaaatgcccgctctgtttcggctttgctgccgatgtccgcttgaacgtaaagaacttctgcgcccaatgctttcagtctgctgatcttctcagactgttcaggcgaacggccgatgagtgcgagcttcaccttttctttttctgcaaggtgacaagcaagcagaaatccaagaccgccgagacctcctgtaatgacatatacgccgttttgtttccagggagactgtgtctgcccgtccagtttctcaatacgttcgaacaatctgatctgccgtatattgtctttataccgaatgtctgtgcagcctgcatgagagcagtctgcttctgttctaatgattgcggccgtctcacttggcaatctctcattcttgtcacagaaggtaatcacctgagtgcgaagagccggattttccagatgtgccgttttcagcatagccccgagagcggaagacaatgccgctccatcctcaacggcgcatacaagctgaatcaatgtatgttctttcggatggtctgtcagttcccgtttgagcatacgaaatatgcgctcggcatctgcttcaaactgctcatctgcaacctcatgctcccttttcagttctatcacttccgcttccgggcaatgtgtgccgagttcaccggtgagacggggtcctgcatcggcagcgataatgagatgacgggtgtgtttttgcccgttctgcaccgccgtttccagcggatgatctttccaggcgggttcaaaaaacagaacctcatcagcaatgtcagcatctgatgtatgccgttcttcggccgaatctttcagcacacagcccgcttcattgataaggtaatccgcaaggcggcggacagaggaatattcaaaaagcagtgtcggataaaactgctgctgaaaagtctgctctaatatctttacaagcttcagcaaatgcgccgagtcaagccccatatcataaaagcctttccgcacatcaatatcctgtgccggacgattgatcaacctggcgatttccgactttatgtaagtcaccatgttttgttccggcgtttgctgttcagacacgtcttctgcggccacagaattttccgactcaccacggccgcttctgttctgctgaggcggcttctctttgtctatcagatgggtaatcatattcgcttgtctgaccctttttactgtcagtttctcacattcggccaatacgttccctgccctgtcgtaaatcgtgaagtcagccgaataaacatcaggttcgctatctgatacgccgctttcagtgcggctgtttttcgcagaataagtgtaaatcgttttcggaaacggctgatacatgcaaaaacgatcgatcataaaaggaatataaggtgtgtcattctgcttttgggccgacaatgcaaaggaagagccggcaagggtggacgcatctaaaaaagccggatgcgccttaaatttctcccggaatccttcagccaaatcactcagagtgagctccattaattcttctttatcctgaagctgataaacggccccttcatttttcataaactcgccatgctcaatatggcttcttcttgcaattccgtaaatgtcatgcatgtcccattttcggcttgcgtttttcatgaacgcttcaatattcagttcttttgccctgggcgtgtcttcttgcaaataaagctggcattccatattctcatcccggtttccgccaagcggtgtgccgttttttgctttttcgctagtaatctcaactttccagctgtcacgcgccggcgtaaaggtcacatacaggtgtttatcaaactcttcagatgttacaacaggctgcttaaaaatgatctgtcttaattctataggcctttcaccgagatacccggcggcgagccgatacagcatatctattaaagtcacgcccgggaggacgcggatttgatgaacgcgatgatcccggacgatataattcgtatggctgattttctgcaggaacgttttgacttgatcggtggcaactgccaatctatcacacctcgcttatttcaaacattgcttctgtgcccgcctcattttcttccgcttcggacaactgtgctttttcaggccaataccgttgttttcggtatactgtctggccgcctttcggttccatggccgcttttcgctctttcggaattccttcgttgctgacaatgatatgggcattattcccgcccaaaccgaacgcgctgaccccggccctgagtatctctttttttccgtcccaccgcttcagctcaagcacaggataaagcggcgaatcattaaattgaaagcgggggttcggcttatggcaatgcaaagtcggcggcagttcttcattggcaatcgccagcaaaactttgatgattcccgccgcgcccgccgcactcagcaagtggccgatattgcttttgacgcttcctacaccgcaaaattgtttttcatcggaataagcagacaagacattggttaatccctttaattcaatcgggtcgccgatcaatgtaccggttccgtgcgtctctacgtatgtcatggtgtccggatcgatttccgctgattgaaccgcctgctcaatcaagtcctgctgcgcccggggattcggcgtcgtcacgcccattgtgctgccgtcattatttatcgcagagccgtcaataacgccgtatattttatcttcgtcttctatcgctttttcgagcggcttcagcatcagcacaccgcagccctctccgattcctgttccgtccgcatcggcatcgaaagattttgaacggccatttggcgataagattctcgccgcgctcattgtgagaaaaggtttttcatcaagcaaaatgtcaaccccgcccgcaaaggccgcttccgcttctccattttgaatggcctgtacggccaaatgaattgccgtaagcgaactggagcaggccgtatccacgaccaggttaggccctgtaaagttataaatgtgcgccatatgtgcggtaataaaattttgccccgcgccaataatcgcatctttttgcaaatattgaaatttctgatgaaacgcacctgcccttgcaccggcaaaaacgccgatacggcggccccagagatcctctttttgataaccggcatcggccaaagcttccgcgctcacttcgagccactgcctttgcagcgggtctatcatcggtgccagcgtttctgaaatattgaaatactccgggtcaaattgatcaatatcgtgaataaaaccgccccatttactgatgctttttccttcttgatattcacccggctgatagtgttccccggcgttccatctgtccggcggaacttcagtgacggcatccgttccgctgcggagattcttccaaaattcttttatatctcccgctttcggaaaatggcaggccatgccgatgatcgcaacctttccccgtttcccaggcttatctgccttttttttgctccgtttcggcgtcttctgcaaagggaccttctccgcgggaactgctgcatctgccgaaaaagcttccggacaatgtacggctaaataatccgcgagctgttctatggtagggtgttccagaaggacagtcggatcaattgaaacggacggcagtttttgatcgatctttgtcagcacttgcgccagaaagatagaatccattccgtattcctgaaaaggcacatcgatatccatatgcgtttcatcgatactcagctcttttgccaaaagcgaccttagccaagattgaatatcaatccggttatgttcccgtttttttgtttcaggaggtttggaagctgctttcattcctttatgggcggctggcttggcattttccagcgctttggcgtcccaatcatgtttcacttgtgccggcagcacgacagctccgggtctttctcttaaaatgtaatcaagcatcttgagaccttcagcgtcagagtgccgcagcaatcccgtttgctcataaatcccgctttttatatccctgctcatgcccgtctcatcccatgccggccattgtatgctaatgatgccgctctcattgttttctgcaaaatagtccatgtaagaattagccatcgcataatcgctctgtcccgccgcaagaatcgggacggctgctgagacagatgaaaacaggacgaaaaatgccggcgcatcatcctttacactctcatacagactgtgaaggccgtctgctttcggcgcgagcacccgcgcgatactgtctttggatttgcggagaaaagcagggttttcacggtccgcaattcccgcgcaatgcagaatgcctccgacaggtccgagcgttgtggttacctcttttataagccgtccgacggcctgcttatccgtcagatcaactgctgagacgcacacttttacaccttgtgattccagctgccggataagctgtattttttccgaaacgacagggtctgtttgctcaagatcccactcggttttcggcggcagctcctttctgcctgtcagaagcagtttcttcacaccgtatgcggaaacgaaatgcttggcgcataaagcgccgagtccgcgagttcctccggttatcatcaggacggcgtcttttggaaacgcagcccggtctgtttgcatggcttctggttcaatctgatcagtctgccgaagaacatagctgaagcgcatgccgtccctatagcaaacagcagactccgttaagtctgattcaatttcttgtttaataaaagcagctgtctgctccagcggctcttcaggatcaatatcggcgtgacaggtgagaatatggctgtattcatgccgcagcatgcgataaagccccgctttttcaataccgtgcataacggcagccttatttttgaaggcttcaagcccttttgtaagataaagcattttcatgttttctagtccgcggccgtattcaatcagctgctgcagcgatgccacccagctgatgtcctgccgcttttgtcgggagccgcagccggtgaagtcaataaacccggaatagatggccgcgttcggaccctgtaagaaagagatgagctgattttcctgcacaatgtcagcatcattcagctgttttttcacctcggcggcaaggtcttttgtatcttcagagacgatgagcgctattttgttgttgaacggctcggatgaagacactgcctcgcacggttcccatgttttttgcaataatactgttttttgattcgaaagcggcagctgctcccgtttcggcacccaatagcggtcggctctgaacggataggagggcaggctgatgcggcgcggcttactgcccgtatacagctgctcccaatccgtgtcaaatccgtttgcccagagccgcagcactttcctgtatttctttttctcaagccaggcgctgacgaggtcagccgcgtcttcatcgtctgagaacatggaaatcgtgttattctcgcgttttttacggccgctgatgatatcttcgctgttttttcccaacagaaacgcgttcagtttttcagtcagttcctctgcggagcctgcaatgattcccagcctcgcttccatcgcgtcccgtccggtctgcagtgtgtatgcggcatctgcaagatcgatttggcgggatgatccgttttggataaaatctcgaaggagacgcgctctttctttcagccgctcttcatttttagccgacaaaacaaaaagagatgacgctttctcacgggtttcctgctgttccgtctcacttctgcccatgtattcttcaataacgatatgcgcattgacacctccgaaaccgaatgagctaacacccgcccggcggggcaggacccggccgttttcatcacgcagcgcttcccactcctttgtttctgtcacaatgtaaaacgggctgtccttcaatttgatatggggattgatgttctcgcaatgcagacttttggcgagcgtccgatgtttcagctgcatcaatactttgataacgcccgcaatacctgctgcgagctccaaatgtccgatatttgtcttcactgagcctatcccgcaatatccgcccggcgccccgtctgtttggaaagcttttttcaatgcattgatctcaatcggatctccgagtgccgttccggttccgtgcgcttctatataagtgatggttgacgggtgaataccggctttttgataagcgcttttcagcacatccgtctgagcctgcggattcggcgcggtaagtgacgctgagcgtccgccgtgattttccgctgtaccgcggatgaggccgtagatgtgatccctgtcacgctcagcctctgaaagctttttcaagacaatcatgccggcgccctctcctctgacataaccgtcagcctgatcggaaaatgttttgcagcgcccgtcttcactgagcatgcctgctttttgaaaaccgatatgcccttcaggcgtgacgatcgtgttgacgccccctgcgaccgccatatcacaatctcccgtttcaatggcttttaccgcgcggtgaatggcgactaaagagcttgaacaagcggtttctaccggctcgctcggcccgtggatatcaagaaaataactcatccggttcggcccgacggacggcacgattccggtcatcgtatacccctcgacaggaagacccgccttattgattaaagtttgatatccgcttcccagtgtgccggtgaaaatgccggtttttgttccggcaatccgttttgctgagtaccccgcgtcttcaatggctttccacacatacatcattaatagacgctgctgaggatccatcatttcagcttctttcggagatatcccgaaaaacagcgggtcaaacccggcgattccatctatgaaaccgccccatttaattgacgttttatttgcatccgctgccggatcgccgtaatattcgcgccaatcccagcgatctcggggaatttctgtaatgcaatgctccccttttgataaacgtgtccagaattcatctatgtctttcgcttgcggaaaaataccgctgattccgataatggctatcggttcggttttttcttctgattttccttttacggatacgggcgtttcccgcttgacatgaacggccgccggagcttcagcttttcttattccggcttttggagcggtttttaaactctctctttctaagccgctgaatgcttctttccattcagatatcaaatggccgctcagtttgcgcaatgtcggaaattcaaagaagatagtcgggctgagctcaagctgataagaccgatttaatagattggtaaattcagtgaaaatgatcgaatcaaatccgtattccgtcagttcgctgtcagcctcaatatctttcatgcttacctttaaaagatctgatacatgccgctttagtttctcttgaacctgatcttccagatctcttgcatctgccactgccggagcttgtccggcggcgctttgttcttcgcccagatcgaaaatatggctgcggatccgtttttcgtcgccttctgccaccatgacctgatgttctccggaggcaaaagcggcgtacagtgcttggatgcctgaggctgatcgcatggctttcattccggtctgttcgtacatcagccgttcggtctctttgtccacgcgcataccgccttcttcccaaagcggccagttgacggagagggtcttcccgctccgctcgttgtcccgcacgagacggttccggcgggctgcataaacgtccataaatgcgttggctgccgcataaccggcctgccccggatttcccatgcctcccgccaaggaagaaaacagaatgaaaaaatccagccgcacatctttcgctgcttcatcaagattgataagccctttcactttcggcgccatgacggccttccgttcgttttctgtctggttcagaatgtagttgtcagcgatcacgcctgcgccgtgaatgatcccgtcgagtgttccgtgctccttctgtatgccgcggacgagggcgatgaccgccgccctgtctgtcacgtctaccggttgatacaatacgcgggcgcccgacgcttccaagcgccgtaagcgggcggagcggtcttcatcaagcgcttccgcccttcccgttaatacgaggacagcgtttttgacgcgggaggctatttcttcagcgaaaatcagtccgatgccgcccgctcccccggtgaggaggtagaccccttcgtctttccacggaacggcgccgctttgaggcgccggcagatgacgccagtttctgacgagacgtttgccgtcttcataacggatttccgcttgttcaggatgcgcccggttttctttcagcttggcaagaagcgccgaggctgactcgtccggatcagcttggatgacttggccgtacagcttcggatgttcaaggtgagccgttttcagaaaagcggccagccccgccaatacattgtcttcccccctgtcggggacaagaagctggatcagcgtttttttcttctgtttttctttgataagacgcgtgacgatcgctgacagctccgccgcgcaggcgtcataacggtcttcaatcggaccttcgccgtcagccgcacatacggcgccgccgcttatgtcctcagcgttcattccgccatacagtgtcacgtatctgaaagactcttcttgtccgccgccttcmcccggcggtgattcctgccactttggctgaagcaagagcggtttttcctccgtttcctcttccagaaaacgggcggtgagccccgtcaatcggacacataccgcgccgttttcatcacacagctcaatatgataggcgccgtccgctgaggaaagcaccgcccacatcgtctcccggcacgcagaaaacacctgcatatcctggagggcaaacggcagaaacggccgtccggacgcggaactgtctgagagcacgagaccgatagaagcctgaagggcggcgtccagcatgctcggatgcaggatgaacggctccttttcctcgcgggcggacggcggaagagtgagcttcgcgagcacttctccgtttccggcatagacggcgtcaagcgcctgatgagacggtccgtaggtgatgccgaggctgtcgaacgcttcatagcactcagcctttgacaagtgacggccgccgcagcgcgcctgaaccgcttctacatcgagaacaggagcacgttccgtctcttcgagcacggcctttccctggaaaaagacaagcggctcttctccttcggcatacgcttcaaaagcgatgtctccgttttcttccggctgaagctttacatgaagcgtcactccttcagaaagcgccgtcaccggacggagccaaacgatctgtttgagccttacacccgttttcccgccgggcaagtcttcagcagccagcgtaacggcggcccgggccatttctaaagcagccgcgcccggaagcaccggttttccattgacgatgtgatcggcaaaaaacggttcatatcctgaaaaaacagaagtaaaacgctgggcggtaaaggtcgatgtattcgtatggagcagcgggtgaagcttttcacgttcagctgaattccggcttccactctctctctgaagacgatcggacgcccaatacgtctgcctggcaaacgggtagcccggcagattgccgattcgcggcaaaggtctgccataaagcaagtccccttcgatttcataaccttgacaataaaaatctgccagcacgcataacagctcctgatattttctatggtcagaatatgaggcgctgcacttgccgagcacttctattatgtgctcctgaatatgctgacggcctgcaaagtgctgcggtacttttcccgaaaacacataaggatgatgttcattaagctttgcctgcttccatacatacactgcgtcatcagcatcttgaaccacgatggcggcgcgatggttaaagtgatgccgtccttttaacaacgtatagctgagctgggccagatcattttctttcagtccgccattttccgcccaagtgatcatatcttcgattttttcctgaagggcctcctttgtttttgcagacaaagtcagtaaatatgcaggggcatccggatgaggtgaagcactgcgcttatagctttccataacgacatgggcgtttgttccgctcatcccgaatgcgctgactgcccccattcggtttttacccggcagagaaggccacggtttacccgttttattcacataaaaaggactcttctcccagttgatatagcggttttccccgctgcaatgcagactggcgggaatcatttcacgggagaacgcctgtaaaagactgatcaaactgacaatgcctgacgcggcaaacgtgtggccgatattggttttaattgatgtgagcgcgcaaaaagcttcttcgtttgtataggcagaaaatgcgtcataaagcgcgttaatttccaccggatcaccgagttttgtacccgtgccgtgtgtgacgatatattcgatatcttcagggttgatacggccccggtcataaacggaagtaagcagccgggtctgcgcgaggccgctcggagcggtaattccgtttgttttcccatcataattgatgccgctcgcccgaatcaccccgtaaatcggatcaccatctttttccgcctctctcagcggcttcagaacaaccgccgcggccgcttcccccggaaccatgccgtcagcccttttatcaaacgcgaagcatttcccgttttccgacagcattccggctttatctatcgtttcaaaaaagtccggggtattcatgatattcaccccggccgcaacagctgttgtgcactctttattctgcaggcttaataccgcctgatggacagaaacgagccccgaagaacatgctgtatttatcgccatcacaggaccggataaattcaagtgataggccagccgcgccgccaaaataccgttatgatgagacgtgacattgcctttgtcccgtgttaaaaggtgataatctccttcttccgcccccacaaacataccgatcgtctgctgcttgatgtgactggcgccgtagccggcgtcctcaagggccctccacgcttcctgaagaagcagccgctgtttcggatccatcgtttcagcttccctcggcgatatttcaaaaaataaagggtcgaattcgtccgcccccggtacagcgccgagtttccattttgaacttgtgaagcctttttttgcgaccggtgcgacaacgtccttttcctgaaacagaatgtcccacagctcgtccgccgtgcgcgcctgaggaaatcggccgctcatgccgataatggcaatggaatcagctgcctgactgccctcggttccggcgttcagcttatttcttcccctctgcttctttcgcttttccgtttctgccttttcaaagacagattgatctgcggattcaggtttcttttcttcatagacatgctccatgacggacttgtgttccgtcagaaaatagcggacgaccttctccagtgtggaatgtccgaaaaacagggccggtgtcacttcaattccgtaatgggcggacaaagaagaggcgaattccgccaaactgatagaatcaaagccgaaatcagccagattgtcagcgtccgtcagtctgttcttgtctattttcaaaagccccgccgccagttctttcacatcccagcttacgcattcttccagtgtaaagcctttcatttcactccgccttcctgaaaacggaacgttcctgtttacagaacccgaaatcggccgttcgccttgatctatctgcaggaagcgtttggccctcgacggaaaaccagccaggacgagatactggctggacggctggactaacaatgtttcaaaagcttcgagtccttcctcagtgtataaataacgctgtccgcttgattttaaatacatagcggtgctttccgccgtgccgacatgcatccccccttctttccaaagcggccaattgattgcaagtgacttgccgcttctgagtccgaggctcacaagtttatcccggtgacggacaaaagccatttggaagcggttccccatcgcgtagtcacaagaaccgaagtctcctaaaatcgctgaagaagaagagaaacaacagaagaagtcaagcggctcccgtgacagaacctgatctaacaccgcggtgccgtccgcttttggcgataagacttgctgaaaggtttgcagatctttctccagaatgctttcagtgccttgaagacctgcagcgtgaatgacaccgtgaatcggcccgcatcctttctctttcacttcttgcaaacctttctccatctgagcctgatctgcggcatccgcctgcacgtaaaacaccttggcgcctgattttgccaatctctttatcttgttcagcaccgggccgtctgccgctgatctccccgtcaaaatgagcgtaaccggtcctttttcagcaaaatatccggcaaataacaagcctaatcccccgcatccgccggtaatcaagtacgtttttccgctctttatcacacgcttctcaacaggggcgatatccgtctgcttcatttccatgacgtggcggatttcctcactgtacatgacactgcggaacgactcgctgtgaagttcttcacatacgttatggatcagtttttctaacggtcctttttgttcaaaataaaccgcggccgtatccgtctccggcaagatcagtttcagcgaccgttccagcccgatccatgactcagcgtaactgatatcggtatcggtcccgcactgagcggaaagaagaattcgcctcggtttagaacgcaaagaagcagctgcgcggatcacatgatacagaatggaatagtctttcacggccttttcatcttcaagcggccatccatataaaacggcatccgctttgcctgcagccgtttcaatatgccgaaacgtttcttgatatgcttgtccgtcagtgattttaatttgataatgcgtgtttgaaagcttttgagtttcctcaccctgtgaaataaaaaacacgccggctcccggataaagggattgtaaagactgataagcatgctttctggcagcttctcccgtaagaaaacagatgaccgttttcagctcttcatgaatggatttcttcagaggctgctgagtccacatttcttcaaatatcatcatctcggattgttcctcttgcccgtgatcctgctgagacggctgtctcattcttatccctttgatttctgcgcagacaatgccggtttcgtcacataattgaatgtcacagccggtttgattctttttattaatatacatccacatgctggatgagcacggacgcatgacgcgcagttcttcaaccgcttcaggcacgatatggactgacggctccgtttttgccaggacatgaaaagctgcgtccagaaattccggcggtatatgatatcccggattacggccgctttcatctgtgagagcaagcttcgcccaaaccgcactttctcccgcataaagcttttcaacggtgcggaactccttactgatcgttacacctgatgtgcctggtgtttcataatcgaatgacagcgggcggcagtctttttgtaaggaggcaatatcaagcacgcgggatggctgtatgttcccttgttcgatgattccataatgatgcagcttctcttcgtcactgtatatttcataatggatgccttcctcgtcttcagacagaagggagagattgacgcccgcaccgtgaagtccgccggtaatcgggtcagtccatgccgctgttcggatccatatctctttttcttcagagctgtctgccgcatgatgaaaagccgcaagcgccatttctaaataaacggctgccgacagaacccgctccccgctcacatcctggaaaacgtgttcccggcctgtaaaagatgtatgatagctttgctccgccaaggttgacgtattttcatgcaggaaaggatgcacatattcagttgttcctgtttttggttcttcccgcttcatccagtagctttcttttgcaaatggataagacggcagactgatacgatgcggcagcgcgcctttatataaagatgcccaatcgacgggcgtcccgtgaacccaggcattcaaaagactgtcaaattgacgtttttccatccaatcactgactgtgccttccgtctctgtgccagcactatcactccggcccgtaaacaccccgcttacagaaccagcatttttcagaaaagcagtcagcttctgttccaattcagaaacagagtccgctgtcatcgccagccgttcttccatcgggaccctgccgacttgaagggtaaatgccgcgtcaagcagattcgcatctgtaattgttccgtttccggcggcatccgacagcaacagagcccgctcgcgcaagcggtctttatcttttgccgataaaacaaaaagcgccggacggccggtgtctgccgaagtcatttcagccggttcatactcttctatcagcaggtgggcatttgcaccgcccgctccgaaagaagatgtacccgcgattctcggatattcccgtgttactccttcagattctatgaccggccgtctccattccgctgtttcctgctgcacgataaaaggagaagtttcaaaatcaatttccgggttcagctgctttgaatgcagcgacggcaccagatatccgtgtttcatctgaagaagaattttggtgaccgcagcaatgcccgccgcactttccaggtgtccgatattggatttaacagaaccgatggaacaaaattggtttgcatccgtatagcggcggaaagccttggttaacccggcgatttcaatcggatctcccaaggaagtgccggtgccgtgggcttccagatagctgattgctctcgggtcaatccctgcccgctccatcgcatctgcgatcacttctccttgtgcattcggattcggaacggtgaacccgttcgttttgccgccggcgttcagagcgcttcctttaatgacaccgtatatatgatcatgatcttcaacagccttcttcaacggctttaacacgatacagccgacgccctctccgtcaacaaacccgtcagccttatcaccgaacgctttgcacgcgtttgacggtgacagcattctcatagaagaaagtccgatataatgaaccggatctgtaatcaggtttacgccgccggcaatcgcgcattcagatgcacctgttctgatgctttctgcggcgagatgaatggcggttaaggatgaggagcatgcggtatcgaccgcgatgctcggaccgtgaaaatcaaacacataggatacgcggttcgggataaagtggtagtgggcccctgtcggatagttgccgttcataacacccgcaaagacaccaacctttttaccggcgcatagtgaatcaggggtatatccggcatcctccagggccgcataagcggtttccagaaacagtctctcctgcgggtccatgcgctccgcttctttcggagagattttaaaaaacagcggatcaaatttatcaatatctgttaaaaagccgccccactttgtatacatccggccttccttaccttttgtctcatcatagtagtcccgccaatcccagcggtctttcggaatttcggtgattccgtgttcaccggtctttaaccgttcccagaactcattaacattttcagctccgggatacctcccggcaagaccgacaattgccacttcaaggtgttttgacggcggttcggaagcgggcggcgctttttcagaaaaagatgccgcttggcgcttcgtcaatccggcgctttttttgcggctttgctttttctgtagaatgtgcggcgccttttcggcttctttatttgtcttgaaaatcccagccatatcatccggtcttgagctgacgagatagtccgctaatccgccgattgtcggatactcgaaaaacaaagtgctgctgatatcagggacgtcttcccgcacgcggttggtcagctgtacgattaagatggaatcgattccgtattcttcaaggggcgtatggggttgaacgtcctcaatcggcatctttaagatggcgctgacgatctgtttcagatactctgtgcttttttcaagcaaagagccggatgatgccgcttcagtatgacggacttcttcagaaaattgcgcatgcagttcgcgctccttcgattcagccaagtatgcggcaagttctcctatcgtccggtattcaaaaaacagcgtgctgctgatatcagggacgagatcccgcagctcattcgtcagctgaacgatcagaatagagtcaatgccgtattcatccagaggagccagcggatttatctcttctgccggcatttttaatacttttgccgcagcccttatcagaaaagccgctgtcttttccgaaagcccctctcccgcttgtttgatggggagctgacgatcagaggatgtttgcagtacgtttgattggcgcttttgcgcggtgtaagcttccctgctctgcctgatgactccgttgcttttcgccgtgataatctgctgggtgtgcagacgttcgttttcagccggaaattgaatggaatgaaaaccttcagccattaaaacggatttccatgtttccggataaagaccgggacaccccggaatccgcagcgcctcgtcttcgtacagccaccagccctctaataagccgaatgtaacatgtgtaaacggcgtatgcccgcccagttcattaacgagcagcaaaccgtcctttttcaatacggcttttgccgtccttaaagttttccggatatttttggtggcatgcagcacgtttgcagcgatagcgatatcgtaggttcgcagatgtaatccctggcccgccgcaggctgctccacattaaacagctgatacgtcaaatacggattgtccgcgccgtattccttttcggcatgcattaaaaaagcttttgacaagtcggtataacagtattcctgaatatggttttgataggggcggagctttttaaacagtgtgctgctcgttccgccggtgcccgctccgatctccagcagacggatgtttgcatcaggattgtttttcattacattttccacataaatacacgcttcatttgccagcacatcgttgtaataatcagcgagaatattatgcttatagattccttcaacaagctccattgaagaatcgggaaacatcacgtcagtggcttttattttgcctgttaaaatgtcaggcaaagcttgaatgacggtattcgccagcagaacctgcgctttcatatccggatctttcagccattcgtttttcttcttatgccactcttcccaaaccgcggccgtttcaccgcttttaaaatctctgtctaaaagacggatgctttcttccagccagcgttcatataaaggcagacaggaagccgccggcgcttcgccggtcagacccattgaacgcagcgtcacccgcagcacttgcagcaaaagccgattcaattctttcatttgattgcttatttctgttcttaaggataactgtgtacggtctttttgtttgtctcccttacccaaaaccttatcctcctaagaaaattaaatttgctccgtcattttgacaggcaatcagatagtcacaaattcatgagggttcattccctcgatcggaatcggcttggtcagcttcatcagccccatgcgggagatcggctgcgtcagcagagtttccagcgcctgcatcccttccgcccggctgatcagcccgagaccgattgcactcagtctgtcaaactcttcagaaatgtgattgtcagcccgctcccaataaccccagttcatcactttgacccggcatgacagccgtccggaaagctcatgggcaaatgcgtctttaaatgcgcaccccgccgcataatgactttgattcggattcttaatatatgaaataaccgaagagaaaaagagaataaagtccaaagactctttcgcaaatacttcggcaatgttgacggaaatatccactttcgccgcaagaccggcgtgaaactgtgattcttccatatcttttacgctttcattcgcaaataccatcgctgaatgaacgacgccgctgatggtgccgtatgtgtttttaatctgttcataggcgcgctgaagcgatggaagatcagaagcatctgcggctatatattcgggagccgggcctgatggccggtaccggtctattttttggcgtatccggctgtccagcggccgcctcccgatccagacgactcgggctttatacgtcgtcactatataatctgtccaaacctcgccgatgcctcccgcaccgccgatgatgacatatacgcctccatagcggtaaggaacactttcagacggcccgctttggaccggaagcaattgaggccggtaccattcctgatgtctgcgcacccatgctttacccgtacggtcgcgggacaggctgaatatgtcttctgcggggaaatcccccccgtcttcaagatcggcgagacggatgtgccagctcggatgttctttagcgagagacccgacgaaaccgtgcacactggaatgagcgggacgcacctcatcatattgggtgataggctgtgcttggtgcgtaatcaccgtcatcccgagctgctcctttccatacccgagaccgataagagctttggccgctctgaaaatctgcagcaccccgcttttttgatcatggctgtcagaatcagccggctgaggggcaaaccagatcatatgctgaatctcaccgagacggcggagccgatcagatatcacttcaacggaagcactttggccgatatcaaatcgcacagctttaggaaacaatcgtaaaaccgcgtccgcctgcccgtctgtaccgcctatgatgacagcttttgcttcagaaatggggaagccggtttggttgtctatcggttccgcgtcccatacctgcatcagtttgacggctccggtaaggttacccgggagatcgtattgcttattatcggttacggccggcgcactttcggccatccgggcagaaaatccttttatccttacacacacattgccgcgttcatcacatatatcaatgtccattcttcgcacggccggtgtttcatgcgtcacaaatacggccgcccacatgtttggactgcacggatgaaaaacggtcagttcatgcaattcaaaaggcattaacggctgctccggataacccgcttgatcttcattcataacgccgatggccgcctgaaaagcggaatctatcagactcggatggagcacaaactgttcggcttcatcagaaacggaagcggggagcaccaatttagccaaagcttctttttccccgcaataaatgtaatcaattccttgatgtgaaggtccgtatacaatttccgcctttgcaaacgccgcatagcagtcttcttttgacagcacttttttgcggcatcgcgctttcagctgttcaatatgcaaaaccggcgcctcagacagcggctcaatcacagcgctgccttcacaataaatgtctgaatcattttcattgctgtacacttgaaatgaaacattgccgttgtcctccaaagaaagccctgtcgtcatacgcagaggctcttttttatgaacggcctggcgtatccagctgatataccgcagcgaaatgccggttttagccgtgtatccagcggctaacggcgcggcagccagttcagccgcggctctcgccatttcaagataagccgccccggggagaacacgcttgtttcggacgatatgatcggctaagaagaattcatctccgttcagtatcgtactgaatttttgttctaacaaatctgatgtattgcggtgaagcagcgggtgaagcctgctttctgtatttgcggaagtgacgggatgatcgggctccggtatccaatatcgttcctttgcaaaagggtacgtcggcagactcatcctgcgcggtttctcctcccgatacagccgcgtccagtctatctcaaatccttttgaccacagctccgcaagttttttgtaagtgccgctgtccatccattttcggatcagctcctccgtatcctgatcatcattcaggaaacccctgatttccgttccgctatcagaccgcccttgaaagcagccgtcaatctgccgttttcgttctgtaaattcagttaatttcctgatcaggtccgcttgatcgttcactaaaaaaacaagccgctcttccattgccagccgtcccgtttgcagcgtatacgccagtgaccgcaaggaaaaagattcatcaggctgcttatctaagccggactggccgaaaagaccggaaagaatattcttatgtttctcatcgtttgtaagacattctgctaaagtccggacggaagtatgctgtatgagatcagtcatgtctattgccagcccgtattgatccgtcatcagctcagaaaactgtgtcagctgcatgacatccaagccgaattccttccaatcctgttcatcatttaccgagccggcctctacatgcagaacttcggccagaacacctcgcaacgctttttccagctgattttgcattgtatctattttgtcgtgaagcggaccgcttccttcaagcgctttatctttgagaaacatcagcaggcgggcagcgtattccttcagccgctccggatttttcgctgatagaggcacgatatacggtctctcttgatcctccgtaataccggggtttttgggcctgtactcttctaaaatgagatgaacgtttgaacccgtcgccccgaatgaactgatgcctgcgcgtctcgggcaggcatgttcacggccgttctctgtatacgccggccttttccatgactcggttttttgctgcacgtaaaatggcgagtcctctaaacggagataaggattaatcgtctctgagtgcaaagaagggacaagcgttttgtgaaacagctgcaaaaccgttttatgaagcccgctgatcccggcagctgattccgcatgtccgatattcgatttaacggaaccgatcgcacaaaattgccgatcctccgtaaacgtgcggtaagctttaacaagaccttgtatttcaatcggatctcctaaagaagttccggttccgtgcgcttccacataagaaatcgtccggggatcgatccccgtcttttcaagacattcagctatcatatccccctgcgccacggggctcggcacggtaatcccgctgacggtccccacgtgattgacggcgctgccttttatcaccgcataaatatgatccttatcttcttcggctttgtggagcggcttcagcagcacggctccgatgccgtcagctgagacatagcctgtgcctccttcgccgaacgtgcggcacagcccgtcactcgaatgcatatccatcaagccgtatgtgatatattttgtcgggtgcaatgataaattgacgcctccggcaagagctgcttcacattcaccgcgtctcagactttccgccgccatatgaacggccgtcaaagatgacgaacacaccgtgtcaaccgccatgctcggcccgtgaaaattgcaaaaatatgaaacccggtttgcgatcggcgcatagttcaagggataaggaaagaccagccctttggccgcagcttcagcgccggcgagagaataatccatatgcatcaccccggcaaacacaccgacgttcattctcttattcggccctttcggctgaacaattgtttccggggtgtagcccgcatcctcaatcgtttcccagcatgtttctaaaaacaatcgttcttgcggatctttagcttctgcctcccgcggagaaatccgaaaaaatttcgcgtcaaaacaatctggatcgtctataaaaccgccccatttggaaatcggcttgccggacggcgatcgcaaatgctcatatgtcctcgtatcccagcgggaacgaggcacttccgttacgctgttttctccattttttaaatttgtccaaaattcacgaagatttttggcgccggggtaccgtcccgccatcccgacgatcgcaatatctccattctgcgttccggctgacgccgattttttcacgcggatttgggttgtcctctttttttcccggggcaaaggctcagcacttgaatgcccgctttgagcatggccgaaaccggctccgtaatgttcgcacaaatatcccgctaattccgcgattgtcgtgtattcaaataacagtgtcggcagtagctgcgttccgattttttgttcaatttcctttaccatgtccaacagccccggagaatccagccccatttcataatagccgatatccgggtcaatctctttcacaggtttgttcaatcgggcggcaagcaattcttttaaataaaggatgcactgttcagtaaggccggcggaagcctccgcacggcggggctcagaaggcgccggttccgctctttgagccgggacggcattccgcccgtcaggttctttcttttgccgtttctgattgatcagttccgggtccctcaccagtttattggcgaagtttttcagttcgccgacttttctgccttcctcattgaaaaactccattgtcacgtaaacgagatctttcttacgggtgacggattctttttttatcttggtgatacatgtcgtctgcagcaattcggcgcaataaaacgattcataaaacagcggcagaaataattgcccctccttcctcgtcaaaggagcgagatatacattggagccgatgctgctcgcatctatcaatgcgggatgaaacatcgtctcttctgcatgttccagctgatccttttgcaccgacagatcaatataaatctctttttcagtttggtagacgcttccgcagcctttcatcattcctgaatgaaccagttcttgatccctgcattccgcgtaaatgtcctcaagcggtatttctgccgccgtttgttttacggcatccatccggacgctttcttggaagccggcgggattgacggaatgcatttgcgccgcggcatatacctttgtctctgctgcttcgtcaccttgtttttgccctttcacctctaccttccactgcccttcgccgttctctgtacaattaacggaaagcaggattgtttctccctgttcaggagctaaagggtgaaaaatcgataagtgcctgagttcaaggccggcatgaaaaaaaccgttttctctgaaagtctgatagatcaggtcaatataagccagacccggcagcagttcctttccataggctttatgatgtttcagaacgggatgctgattgttaataagaagctgctcttgcatatgaacttcctccatatcgacgttcaattttcagcgcaatcagtaagtcttcatttgtttccaaaacgtattcgggcgggacttatgtgcgtttccatgcaggctttcggctttgtccggacgaatgggccggcgttttaattcctgtctcggcaaaggctttctaaccggggtatacgcctcttgctcccaggcttccactatgacatgggcattcgtccctccgtcagcgaagctgctgacggcggcaatccgcggtgaatccgtccattcacgcagagcgtgcgaaaaataaaacggcgaggcggacagatcgtaatgcgtcatcggctctttgcccgaaaggaaaggcacacgcattcggcgcgagagcataagcactgttttaatgaatccggcaatcccttcagcgcataacgggtgtccgatattcggcttcatcgaccccaattcgcaaggcgcgctgttttgcatacggtacaccgcttcaatcgccctcagttccaaaaggtctgttacttcagagcctgaaccgtttgcttcaatgtagctgatatcctccgcttttctgccgcttttggcaagcgccttggccatcacttctttctgcgcctgtatattcggtgtggcaggccccgcggttctgccgtcattgtttacggaaatgcctttaatgaccgcatgaatccggtccccgtcttttacagcctgggccgctgtttttaaatacaccattccgacgccttctcccaatacgatgccgccggtgcggcggtcaaaaatatgaaacgcaggctcttcgcttaacagattgcgaagttcgaacatccggtgggtttgaccggattccagcagactgactcccccgaccaccgctgagtcgatttcaccgcaagaaagcgcctgtatcgccatattcataccgacaagcgctgaagaacaggccgtatccaaaacaagactcggccccttcaaatcaaagaactgagaaagattggccgctaagtaattcggaccggctgcgactatcggattttttgcatgcttcagacggttttcatcaggcatactgccgccgcgtcctcctaaatagacaccggctgacctgcctttcatttcttgtaaagagtaaccgctgtctctgaacagatgaagcgcctcttctaatataagaaaggactggatatccattgccttgatgtcttcttcgggaataaggaaaaactccgggtcaaaatgcgttacattttgtaaaaggcccgcataatccgccttctccgttttccagcgctctttcggaactctttgaatggctgacgttccttcagacagcagcttccaataagcttcaattgattcagctcccggaaaacggcaggacattccgacaacagcgatgtcttgcgccgctctagcacgagaaggctgaataacagcggctgctgtttgtttgggagcgtccgggatttcaggctgaaccggttttgaaacggcagctttgatttccggatatgctgtttcaagccatcccgccagcgcagcaaccgtagggtattcatacagcaccgccgggtcaaggtcagctttgatcctctttccgatcgctctggacacttgggcaagcatgatggaatcggctccgtaatcttgaaacggtgtatcagattcaaatcttgacggctccagtcttaattcccggcagcaaatgcccgtcagccactcctcaacgctttctgtatcggcctgttcctgctgctttgtttcagtcaggccggatgaaagcagcagacggtcaggctcccatttttccgggtgaatgacggccggcataataacagatccgcaatcgcctgccatgatggcatcaaacaggctcagcccttctctgtcagtgatgctctttaaaccgcttttctgataggcccggctttttgattcgcccatacccgtttctttccagctcggccactggatgctcagcaccggaaaaccttttgcagccgcaaaataatccatataggcgttagccatggcataatcgctttgtcccgctcctaattccggcatcacgccggacactgaagaaaacagcgcaaaaaaccggagaggctccttgtgcagcgcttgatacaaaaggtccagtccgtctgttttaggttcaagcacgggcatcatctgttctcttgttttgcggataaaggccggatgatcgagatctacggctcccgctgcgtgtaacacgcctcctatcggccccatttgatttttcacacggctgacggcctgctcatattcagggccggaagatacagacagcacttccgttcgtacacctttttgttcgagctctctgattcttctcaccttatcggaaaacggggaattccgtttgatatgatcatcccattccgctttcggcggcattgtttcttttccggtaagcacgagtttcgtgactccgtaacgttcggcaaaatgccgggcaaataaatatccgagtccccgggtccctccggtgatccagagcacatggtctttcggaaatgaaaattctttttcagctaagctgtttgtttcctttaaccgcgcgtgatagcgcacaccgtttcggtaacacacttcgatgtcttcagaatcgcgaaaaaactcatctgcgatctggtttgccagctcaggatcttcggcagtccgttctgcatccatatgccgcgagcggatatccttatactcactttggagcatccggtacaatccggccttttttgcacctgagagatttatcgtttcatttgcaaagggttcaagcccctttgtcacacaaagcagctgaagctttcggccgcggtttctgttgtcaatgagagactgcagacgatgaatccagccgtcatcatgattgatttccgtcccgcatccggtcacatcaatcagaccgccaaatcgggccgcgtccccggatatttccggtgatgcagcgtcaatgatttcagactcggggaaataacgggacagctcaacggctaaatttcctgtctggtgatcagcagctattccgatgacgccccgcacttccttagccggaacacggctgctttctgcccagcttttctgtaaaaagcggatttcacgaaatgtttcagaatgtgattcagcatcacgaacattgtccggcgctgcatcgtccggccaataccgatcctttataaatggataaccgggaaggctgatgcgatgcggcaggctgccgttataaagctctgaccattcaaccttcagcccttttacccaaagttccagaagcttcgcgaatttttttcgtttcatccatttacggacggcttcctgcatatcttcatccttaaaaacggctagaatgtctttatactgtttgctttttcccctgaagcagccgtctgtcccgccgtcaataaaacgctgcagtttttccgctaactgctctgtcgacgtcacgataaacgcagcacgttcttccatcgcttctcttccggtttgaagggtgtaagccgcatcccggaggctgcggtctgtgacgtcattttttctgatcgcttgaagaagctgctgcgcccgctgcttcagactggcctcctgtttggcggataataaaatgactgcgggatcttcatctgtgaatggctcataaatctccctatcaggttcaatatattcttctatcaatatgtgggcatttgccccgcccgcgccaaaagaagagattcccgagattctcggaatctctttttgcgctccgttttcctcaatgaccggccgtttccagtctgccaattcacgctgcaccacaaacggcgtccggtcgaatgcaatattcggattcaattttctgcaatgtaaagagggagccagctgtcgtttttgaaactgaagcagcagtttcgttacaccggcaatgcctgccgcggcttccaaatgcccgatattggatttaactgagctgatggcgcaaaaacctttatctgacgttttcgtttgaaatgcgcgggtcaaaccgtctatttcgatcggatctccgagttcagtgcccgtgccgtgggcttcgatacagctgatcatccgcggatgtattcctgatttttcaagcgcgccggaaatcacgtcagcctgagcgctcggactcggcactgtatacccgtttgttctgccgccgtgattgatatgagtgccgcgaatcaccccgtaaatatggtccttatcagccatcgcttttgacagcggctttaacagcacggccccgacaccttcaccgggaacaaatccgtccccgctttcaccgaaacttttgcacgttccgtcttttgaaagcattcgataggcgctgagctccgcataagccgaaggatgcgtatacacattcacaccgccggcaatcgccatgtcgcattcgccgcgaaggatgttttcacacgcttcgtgaattgcagtcagcgaagatgagcacatcgtgtcgaccggcatgctcggccctttcagattaagaaaataggaaactctgttggccgctgaactgaacgacgttttcggctgcagggtgccgccgtttttccagtacattccgtacccgtttttcgtaatgcccgcaaaaacgccgacccggccgttatacaaattctcaagctgttccttcgtataaccggcatcctccagcacctgccagcacatttcaataaagagacgctcctgcgggtccatattcaaagcatcacggggtgaaatttgaaaaaacagcggatcaaagaaagcggcttctttcagaaacccgccccgcttactgtaacttttcccttctttcacggccgcttcaggatcagggttgtagtacttgtccttttcccagcgctcttcgggaatttccgtcacacagtcttttccggccgctaagttatcccagtactcttcaagtgtttcagcttgcggataacgtccgctgactccgataatcgcaatcccttcttttgtctggttctcattggaaaaagcaggccgtttctttcgcttgataaacgacggaagcaccggaaaatcttcatttgccaaaacctgttctgatatgcctgaacggtggtcatcatcatttgtccattttcggcattcttttggataatccgtgacaaagtgagctgccagagatcccagtgtcttatattcgtaaaaaaccgttttggaaaggtcaccgaaaagcagagacaattcgcggttcaatttcgtcacagtgactgagtcgattccgtaggtttccagcggctcttcagtatctatgttggaaacagcaatttttgtagtcagggcaaacagcgttttgagctgaagaagcgtttgttcatacaaacgttcactgcggtgttcggcattggtttttccgggagcgcccgtcttgatgacaggctgcagcttcaaccctgatagggaagcccatattttcccttcttcgtcacataaatcaatataaaagctccccgccttctcttgtatctcggcccataccttgtcaggacaagattcataaaacaaaagctcgtccaatgaaaccggggcgagcgttttatattctttgccgccaagcagcgcgcatgcctctgtcacacttttcatcacacagggagggaggccgaatcgggcggattctttttggtttgtcaatggaattgatatgtctgccagcatccgtcctgctgaggcgtaaatacgctcaattcctttcatgtgctcactgtattgaacggtatcgttctgagtgatggcttcaatttgctgctgatccatcagggaaccgctgttttccttcaagcggctgatatccagcatgccaggcgcagcatcaactggctgaatcatcccttggctgtacacatcatgatgactgaaatcggcagaaaatggattgtaaatctcaaaccttttggcttcaccctctgcgggtatcagcctgatttcgatatggaacggctcagcctcagtcagaatgggctttgaccacacgatatgtgtcagccggacagcctcagtctcctttactgtcaaaacagccgcagctctcgccatttccaaaagaagttctccgggcataagctttttacgctgtaaagaaacatcagcgagaaaaaattcccggccgctgaaagctgccgagaatccctgtcccgtttcatcggaaatatgctgctgagcaagcggatgaagggaagccgcttggcgaagtcccatccgcatatcataatcgcgcaaaatgccgatcgcatcctgttttgtcatttttttatttttgacgtcagaaaaaacccggtgcagaaactctttcatatggtttcctccattacgctaatccctgtaaaaaccgatcgttctttttacagcggcttctatgcttatttcgtttttctccaattcatcaagcaggcgctcataagtctcaagcggggacgtatcaatctcataagtctcccggtgccttatatgctgcgcactgtgcggtatccagcaatgtgttttcgcaaaaggatagacgggcaggctgactttttttggcctttggtccggatataatttattccagtcgacatgtaaaccttgcacccataattttgcaagcattgcatatttgcctgcttcaatccattgatctacggtcccgctcatttctgcgttgtccgtcatctctgtaaacagctgtttcatcgctttgttccggcctgtaaagaaattctgccccgtctccttgccgctgaggaaatcattcagcgcgttcgtaagctcttcttttgtttcagcaatgacggcaaggcgctcttccatttcatcccggccaagctgtagcgtataagcgatacccgcaagagctccgtcagctgaatgtgtcttttccaaatatctgcgcagctgttccgcacgttccttcagctgttccgccgtctttgccgagagaatgaataaggtcggctgaagttcaccggacgtccattgtttctcttcaacaggagaaacatattcttcgagcacgacatgagcattgacaccgccaaatccgaacgagctgacacccgctcttcgcggcagttcattcccgctatcatcagccgctgctttccatggctgagtgtcgcggacgaagtaaaacgggctgtcgtcgaggctgatatacggattaacggtttcacaatgcagacttttaacgagcgttttgtgctgcatctgcaaaataatttttaaaagcccggccatgccggccgcaagctctgtgtggccgatattcgttttgacggaaccgatggcgcaatgaggctgatcgggtgccgttactccggctttctgataaagcgctgcaaaagccgctttgagtccgttgatttctatcggatcaccgagcggcgttcccgtgccgtgggcttcaatataactcactgtacgggggtcgatgttcgcttgctgatacgcttttatcatgacttctgtctgtgctttcggattcggtgatgtaagggaagccgcccgtccgccatgattttccgccgttccgcgaataacggcataaatacggtcgccgtcacgttccgcatcggataatgttttcaaaacaatcatgcccgcaccttcagctctgacatacccgtccgcttgatcggaaaatgttttgcatcgcccgtcttcactgagcattcccgctttattaaagctgatatgcatatccggcgacacaatagcattgacgcctcctgcaatcgcgatgccgcagtctccggcctgaattgccctgaccgcacggtgaacagcgaccaatgagcttgaacaggcggtttcaatcggttcgctcggcccatgtatattcagaaaatagctcatgcggttcggaccgattgacggaaccgtaccggcggcggaagaaccctcaatctctatatggaactttgaagcttcctgagcgtaaccgctgtttgtcgtgcctgcaaaaatgcctgtatttgttcctgacaggcttttggcagagcagccggcatcttcaatcgctttccatacatgcatcattaaaagtctttgctgaggatccatcatttcggcttcatgcggagaaataccgaaaaataaaggatcaaattgagcggtttcatcaatgaagccgccccactttacattgctcgcatttttatctttctgcggatctccgtaatactgtctccagtcccagcgctccggcggtatttcagaaatgcagtccttttctccggctaaattctcccaaaacatttccggattttcagccattggaaatgcacagctgattccgattatcgccacgggctcaggtgcagctgcggtttttgttttaggaagacgggacggaatcgagaatggctccgtcttcatttttttacgcacaaccgatttctccgtttctgtttctgcctgtgagccgaatgtatccggatgttccgtcagcaagtattgggcaaaacgaaagactgtcgggtattcaaaaaacacagccggtgtcagttcaagcccatacattttatttagttcatttgcaaactgcgtgaatgaaaccgaatcaaagccataatctctcatctctgattcagcatctatctcgtcttctttcaccttcagaatgcctgatatcatatgtttgagttccgcttgtactttattcggcatatggacgggcgtcttccttgacacatgaatgctacgggacggttccggcgtttcaggcatcaggttttttcgaatccgtttttcgtcgccctctgccaccatgacctggtgttctccggaggcaaaagcggcgtacagcgcttggatgcctgaggctgatcgcatggctttcattccggtctgttcgtacatcagccgttcggtctctttgtccacgcgcataccgccttcttcccaaagcggccagttgacagacagagtctgtccgctccgctcgttgtcccgcacgagacggttccggcgggctgcataaacgtccataaatgcgttggctgccgcataaccggcctgccccggatttcccatgcctcccgccaaggaagaaaacagaatgaaaaagtccagccgcacatctttcgctgcttcatcaagattgataagccctttcaccttcggcgccatgacggtcttccgttcgttttctgtctggttcagaatgtaattgtcagcgatcacgccggcgccgtgaatgatcccgtcgagtgttccgtgctcctcctgtatgccgcggacgagggcgatgaccgccgccctgtctgtcacgtctaccggttgatacaatacgcgggcgcccgtcgctgccaagcgccgtaagcgggcggagcgctcttcatcaagcacttccgcccttcccgttaatacgaggacggcgtttttgacgcgggaggctatttcttcagcgaaaatcagtccgatgccgcccgctcccccagtgaagaggtagaccccttcgtctttccacggaacggcgccgctttgaggggccggcagatgacgccagtttctgacgagacgtttgccgtcttcataacggatttccgcttgttcaggatgcgcccggttttctttcagcttggcaagaagcgccgaggctgactcgtccggatcggcttggatgacttggccgtacagcttcggatgttcaaggtgagccgttttcagaaaagcggccagccccgccaatacattgtcttcccccctgtcggggacaagaagctggatcagcgtttttttcttctgtttttctttgataagacgcgtgacgatcgctgacagctccgccgcgcaggcgtcataacggtcttcaatcggaccttcgccgtcagccgcacatacggcgccgcttatgtcctcagcgttcattccgccatacagcgtcacgtatctgaaagacgcttcttgtccgccgccttcatccggcggtgattcctgccactttggctgaagcaagagcggtttttcctccgtttcctcttccagaaaacgggcggtgagccccttcaatcggacacataccgcgccgttttcatcacacagctcaatatgataggcgccgtccgctgaggaaagcaccgcccacatcgtctcccggcacgcagaaaacacctgcatatcctggagggcaaacggcagaaacggccgtccggacgcggaactgtctgagagcacgagaccgatagaagcctgaagggcggcgtccagcatgctcggatgcaggatgaacggctccttttcctcgcgggcggacggcggaagagtgagcttcgcgagcacttctccgtttccggcatagacggcgtcaagcgcctgatgagacggtccgtaggtgatgccgaggctgtcgaacgcttcatagcactcagcctttgacaagtgacggccgccgcagcgcgcctgaaccgcttctacatcgagaacaggagcacgttccgtctcttcgagcacggcctttccctggaaaaagacaagcggctcttctccttcggcatacgcttcaaaagcgatgtctccgttttcttccggctgaagctttacatgaagcgtcactccttcagaaagcgccgtcaccgggtaaggtgaaaaagcgcaagaaggatgggcagccatatgccgtggtcgataatatattggatcggaactttcagtctgatcgtcctctggaaaagctagtaacggatatcacatatttgccttatgggcagaaacaattgtatctttccagtatattggatttatacaatggagaagtgattgcttttacgattggcgatagacaggacacagactttgtcttacacacacttgatcagctgcccgcactgccagagaactgtgtgttacatagtgaccaaggttctgtttatacatcttatgagtatcagaaagctgttaaaacaaaaggcattaccatgagcatgtcccgcaaagggacgcccgctgataatgcctccatcgaatcgtttcattcctcactaaagtctgaaacgttctacctcgacaggttggaaagcactacgacgaccatcgtagaacaaactgtcgaaacctatatacactattataacaacattcgtattcaaacgaaactaaacaaccagccgccggtcacataccgacagctggctgcttaaaggtgttttgatccctgtctcaaaaacgggggtcagtcccttcacgcccggctttttttctttaatttcagcaatgaaatcctcatatgttctccctctatatacaaaaaatctttaaccaactattgactcttacgttgcgtaatactttagagtagccattaaggaggcggcaaacgtgatgggtatgaaagtaaaagaagtagctgaactgattggagtgagcatacgtactctccatcattacgatcaaatcggattattgactcctcaggaaacgaccgattccggttatcggctttattctgaagagaatcttgaacagctgcagcagatactatttttcaaggagctcgatttctccttaaaagagattaaagaaatcattaatagtccttcatttaaccgaagggaggcattaattttacaaaagaaaatgttgattgagaaacggaatagagtcgataagatgattgaaaccatcgataaatcaatcaaacatttgatgggagagattagcatgacgaacaaagagcggtttgagggaatgaacttcaatcataatctttatgaacaagaagctcgcaaacggtggggtgatcaacctgtcgataaggtaaatattagattaaaaaacatgactgatggtgagcaaaaagatttatctgataagtggactgcaatgttcaataaatttgcactccttattaaccaatctcccaagtccccagacgtacaaacagctatcaaagagtggtttgattttctcaatgaaaattttggtgaatattcttttgatgccttttacggattaggtcaactctatattgaagataaacgcttcactaagaacatcgatcagtatggtgaagggttggcgaagctcatgagtgatgccattacaatttatatagatcatcaaaaaaagggtggtacccattaaaatcattatcgaggatacaatcaggcaatacgaaacgttattttcaatgattgaaaatagagaagattattatcggtattcaatgatgaaaccttttgaagatatgtggaaaaagatgaatgttcccttaaaggcaaagcaacctaacggatatgatgtaatcatggctgcaaatatgctgggctatctgagcatatttgatacggaaaccggaagaaaagcattagagaatctaaaagaaattcaagctcttcaaattgcatatggcactttaactcattgtgtagaatttatccaacaaaaccgcttaaaaataaatgctgatgaaataaggtttgggatgtatttggccaatcaaaaaaagcttgagttacatagagggtattgtggattcggaggaattccgggatttattcaagtttcaatattccccaattcatataacataccgagactgcctgctgtaatcgcacatgaatttcatcataatattcgtttttcgtatttcaattgggattatgggaacgtaacggttggtgattacttaattatagaggggttggcagaatcgtttgccaaagaactttacggagaagctttgttaggtccttgggttacttcttttgaaaaagaagacttagaatactcaaaagaaatcatcaaaggctcgttaaatatgaaaggatttgctgaggtcagcagttacatgtttggtgacacctttgcagccgaacaaggttatcagcctgtcggcttatcaccgtttgcaggttatgcggttggctaccaagcggtacaatccttcatgaaagccaacaatgtggggattagtgaggccactttacttagcacagatgagatactaagtaatagcgggttgtttctttaagatatgaagattattttatcccgtattaacgcgatggaagagggttttcttttcccctctttccacgctataaatgatcatcctattttttccgcaagaaaacaaccttcaaatagttcccttctttaaacgcgggaatcgttttgaaatcttccggaagcgtgtattcttccaaaatgtcgtaacgctcatttgtttctttaaaggcggtctctataaagcctttaaatttcttcatattgaaggcgctgctgtttgtcgaagcgacgatgatgccgttttttgcggtgatggcgatcgtttccttcagcagatttttataatctttcgccgcgctgaacgtccgtttttttgtgcgggcgaaagaaggcggatcaaggatgatgaggtcaaactccagcccttttttctccgcatagccgaagtatttgaaaacatccatgactttaatgtcatgcgcttcataatcaattccgttggcgctgaactgttcaattgtttttgcgagactgcggttggcgacatcgacgctggtcgttttctcagctccgccaagcgccgccgcaacggaaaatgcccccgtataagagaacgtattcagcacccgtctgccgtttgcatacttgtcccgaatcgctttgcgcacatgacgctggtctaagaaaatgcccgtcatcgccccgtcgtttaaatccaccgcgtatcggatgccgttttcttgaacaatgaccggaaaatctcctctttcgcctttgacaaaatcgtcgtcttccacgtattgcccggccgtatcgaatcgtttcttttcatagatcgctttataagaaagctccagtccgtcaatcgcctcaatcatgctgtccttataagcgtaaatgcctttactgtaccattgaatcagcagataaccatcataaaagtcaagcgtgacgccgccgatgccgtcgccctcaccgttgaacagccggaacgccgtcgtgtcgggcgccttaaacagatgggctctcgcttcagccgcttttttcagcttgtccagaaagaaacgtccgtcgatccgttcatctctcgcgcgtgacagcacccagccgactcctttattctgcaaaccgtaatagccttttccgataaactcacccttctcggatgtcacatcaaaaagatcgccctctgttaaatgagcagagcttccggacagagcgtctttttcaatcagggggaatccttttttcagctttccggcaaatgtatctttcactgtaagtagcttcattgtgcattcctctttcgttttgctttctcttatcgtaccataaaacatgatcaacaccgcattgtcccgaaaaattcaaaacagggggaaaaccatgacagccaaaagaatcgaccatacaggcattatggtcaaagatattgaaacatccatcgccttttatcaagacgttctcggtatgcagttaaaggatcgtatcactcatacgaacggcattattgaacttgcctttctcggctttcaggaagggccggagacagaaattgagctgatccagggctacagcagcgagcttcccgcagaaggaaaagttcaccacttcgctttattaactgaagatatcgcggcggagttcacgcatgcgaagcgtcagggcgccgtatttatcgatgaagaaatcacgacgcttccgaacgggtaccgctacttttacattgaaggacctgacggcgaatggattgaatttttccagcgttaaaaaaaacgggcgaaagcgcccgttttttttatgtttcttcagtgacgttttgttccgccgcccgttcctctctccatttttgaagatcccaaattcggaaaaacggataatagatgataaatgtaatcaggagattgatcagctgcatgaccgaaccggagattttcccgcccgtcgccaaataaccggaaatcagcggcggcatcgtccacggcacggcgattcccgccggttttgccaccatccccgtgctcatcccgatgtacgtcgccgtaatggtcaagagcggcgcaatgataaaaggcacgattaacagcggattcatgacgagcggcatcccgaaaataatcggttcgttaatgttaaaaatcgcgggcccgattccgagacggccgagctgtttcatctgtttgcttctggagcgcacaagcatggtcagcacaagggcaagcgtcgctccgcttccgccgacattaatccatatttgaaagaactgtgtcgtaaaaatgctcggcagcgcttctcccgcctgaaaagccaaacggttggcgtccatcgccccgtaccagatcggcgacatgacgccgccgataatggacgcgccgtgtatgccgcacgaccaaagcagcatttgcacgaattcggcgataagactcccgccgagactcccgcccaaaatagacagcggggtgcccagcagatcgcctacgacattgtggaggcttttaaaaggagttatttcaataaacagacgggccagccatacaagcgtaataataatgaaaccggggatgagcgcaacgaacgatttgctgaccgcaggcggcactccgtcaggcattttaatgacgatatttctttgtatgataaaccggtacacttccgtagacagcattgcaatgatcatcgcgacaaacagacctttgcttccgagcagcgaaatcggaatgccgcctcccaccataatctctgttgccgagccgtcaggaataaacggaatctgatacggcgtcgccaataaaaaggcggcaagggcaatggctcccgacgacagggcatccacctcatagctttccgcaagccggtaggcaatcccaaaggcggcgacaagcgccataatgtcaaaggacgcattcacgggatacccgagcttttcaacccaattttcaccgaaaagaccagccataaaatcggcataaccgggaatcggaagactcgtcagaatcagaaaaaccgatccgatgatgataagcggcatagtcaaaataatgccgtcccgcaaagctcttaagtgcctttggccggcgacttttccggcgacaggcatgattttttcttccatgacccgattgaacgtactcatttatcaaaaaccccctttttgagttcattgcgcagatgtcttaaagcattttctccatcatattttggaaacgcttacatttgcatacagaaattttccttatccctcaggaaaaaaagaattccgcactgccgatatataaagaaaaagggggaatcacaatgtatcacaccctgaaaccgataatggccgcggccttgtgcgtcggcctgttctccgccgcggcgcccgcgcacgccgagacgcacgaccgggacgttatcgtggtgtacaaaaatcaaaacggcaaggaatccgccatagacagcggagcggatgtggaacagacctatcagcatctcccggcagtcgccatgtcagccgattcacaaacggtgaaagacctgaaacaggaccctgacatcttatatgtagaagacaatgtatcctttcaggcagcaggcggttctgatatccgcccgttatcagcggcccaaagcagcagttacgcgctgccgcaatgggatatagaaccgactcaggtcaagcaggcgtggaaagaaggcttgacgggaaaaaaggtgaaagtggctgtcattgacagcggcatttatcctcatgatgatctgtccattgcgggaggctattccgcagtcagctatacttcctcatacaaagatgacaacggacacgggacgcatgtcgccggaatcattgcggccaaacatgacggatacggcattgacggcatcgcgccggatgtccggttatatgcggttaaggcattagacagaaagggtgcaggggatcttaagagccttcttaaagcaatcgactggtcgatcgccaataaaatggacatcatcaatatgagcctcggaactaacgcagacagcaaaattcttcacgacgccgtagataaagcatacaaaaaaggaatcgtgatcgtagccgccgcaggaaacgacggcaacaaaaaacccgtcaattatccgggtgcctacagcagcgtaacagcagtctcagcgtcaactgaaaaaaacgggctcgcggctttttccacgaccggaaaacaacttgaatttgccgcacccggcaccaatattacgagcacgtacctgaatcaaatgtacgccgtagctgacggcacatctcaagccgcaccgcacgtcaccggcatgttcgcgctgctcaggcagaaatatcccgaggaaacaaatacacagctccggcagcagatgcagcaaaacatcaaagatctgggcgctcccggacgtgacagccgattcgggtacggcctggtgcaatatcatgtaaagcaaaagagctatgccgaacgggccgtaataaaagcggaaaagacgaaaaaacaggcagatatcaatcaagcaaaaacggccgtcagcaagctgtccaagtcaaagggaaaaaccgctctcgagtcccggatcaataaagttcagacggcaagaaatgtgacggacgcaagagacaaagtccggactgccgaaaaacaaaagaaaaaaaccgccgtcaatgccgcacaaagcgccattcgcaaattaccggccggttcagaaaaaaaagggctgcaaaagcggctgaacgctgtcaactcaagccttttgaaaacagctgaggccagcgtcaagcaggcggaaaaaaagacctctgaggccagcaccgtaaaagcccaaaaagcagtcagcgaaatccagccgggaaaagaaaaaaacgctctggaaaaacggcttgaccggataaaagataaactcaaccggcagcaggctagagacaaagtaaaaacggctgagaaaaccaagacgaaaaaagcaaaatcagcggcgcaaacggcagtcagccgattgaagccgtctgccgaaaaaaccagcctgcaaaaacgcgtgcgtgcgattcgggtgaaatagcaaaaaaaacgcttatgagccggataacggcttcacaagcgttttcatcacacctgcctattggttcatggccgggcggtcgatcgtgttccatttcgtaaaggacatatatcggaaataatgatcacgatacgggtgcgaggtgcctgtattccaaggcttgtcactgccgcagaaatggacgatggccggttcggcacgtgtttctctgtaacgtatacggtcgatcagttcaggaggcgttttctcgttcatgataatatgcgtctgcgcgttccagcgcggatgcagttcatgccattgatcatataagatcgcgttaagcgcgtcctgatcatgaaacacgagaaaatcctccgagctgttttcgttgataaaatcaatcaccttttcggaaatattttgttttctccaaggttcgaaatctataatcataatgccggaattaaaatacttggcagtttcgctgatattcatttttttcagtctttcatgctgtccggcgtcttctaccgccgcaactattgccggggaaatatccaagtcccataaaaccgaaatatcttccatcacaattgcatcgcaatcaatgtaaatcatccgctttacggactcatccttaattaaatcagggatggaaatgcggtaataagccgcttttgtaatgtggctgctttcgactgcatgcttgtattgatcagcgtctacttctaaaaattcaagcggcgtcccgaatgacatcgcggtctgttcaagcttgtccttgttttcggcagtaattccgccgtcgattacatataattttgcatcccttgttttatccatattcatcaataaagaagcgaacatcccacccaaatgacgagcataatgatcatcggcacatgatacgatatgcattgtttcattctttcccactgatattcatctccctttttgttgtacaaatgtctttccctttttttaaaaagtaaacctcgatcttacacattttttctgcgggaatgtgctgtttgcgatttgatatcttttgcattccctgttcaaattcaatcaggatttcagcctgaatcatcgtcagaatatatcgcgcaggaaagcgaaaacacgtaaacataaaaacaaccagccggactgcacataaaagcggtccggctggttgtgatgcgtcaatcgtttaatcgacttctttcttaatcccaagcatcttttcgtctaaataatgggcgatgtccgccgcttccttcagctcgtcggtcagatgctttgggacttcgttatttaatttgtaataaattttatgttcaagactcgcccaaaaatccatggcaatggtgcggatttgaatttccgccttcacatattccacacgattcgtcaaataaacgggaatttcaataatcaaatgcaggctgcggtagccgttcggcttcggatgtttgatataatccttcacctttacgatcttcaggtccttatgctgcttcaaaacctcagcgacattataaatatcggaaataaaggaacagataatcctgacacccgcaatatcatgaatatgctctttcatttcctgcgtcgtcacatcgcagcctttgcgcatcagtttattgacgatactctcaaaacttttcacgcgtgattttgtatgctcgatcgggttatgcccgtgaatcagattatattcctggctgataatagaaaacttcgtatccagctcatctaaagcgaatttataaactaataattcatttttccaatcttccatgaccgttttcaaatcatccatatgggctgttgacaagtccatttttttcatctccttgctttgctgtccatatatgagacgggtcagtccgcggtcaggttctttacaaaatcgtgaagattatgtcataaaaaaaagcaaatgccggttatggcatttgccctttcatttgatcagcggaaataactgatcaggagtccgatggaaagcaggaatccgaaaaatgtattggtttgcgccgttgatttcatcgcaataatcatgttcatcggcatttcgtttttcacaaagcctttcacggcctgaacgggtttcggcacgctcaggaagaccaggaacagccacgggcttgtgtaacccataatgacaagaccgacgatccagatgtaagcgatggcaaaagatgcggccagtatcatgacggcccctctatgccccatcaaaatggccagggttttacgtccgccctttttatcttcctcaatatcacggatattgttggacagattaatggctccgaccaagatggcgatcgggatggaaatcaaaatgctctgttcattaattctgcctgtctgaatgaagaaagaaataaggacaaatacagagcccatgcaaatgccggagaacagttccccgaacggtgtatacgcaatcggcagcgggccgcccgtatacagatagccgatcagcatgccggcaaggccgatagccgcaagccaccagctgctgctcatgcagatataaacaccgagcacgagggcaatcgcataagagccgagcgccagctgcagaattgttttcggcttcatgccgtggcggacgatcgctccgccgataccgacggaatcctccgtatctaaaccgcgtttaaaatcgtaatattcattgaataagttcgtggcgatctgaatccaaagacaggaaaacagcatggccaaaaacagcaggaaatcaacctttacgtaaaacatcgccaatacggtgccgagaagtacgggcacaaacgatgccgtcaatgtatgagggcgggttagctgccacaaaatgcggcccatgctttctttctcgggcgtcttttggctgccccccatattgttttgattcattttcctcttcctttctattaaaaggctttcacagtcagccgataacagtagtgttgaattggggttttcacgttttctgctaccttatctatcataataatttcttcctcatttcacaagatgcggcgctttatcggctatcctgccggaaacggcttttcgcccttctccattggggttcggcacaagcctgcttaagaaaaagccgccaaaatttttttacctcgtttatatttacgataagttaaaaatcccgcctgaacagcgcccttttagtatgatcatttgccaatttatacatgcgtgttttccatccttttgtttctcattcatttttaaggaaattttaagcttaggatattagacatattttgaaactttttgttaatctaatcgtcatatactggtgtaattattgaatacgcggggaaggaattttgaatatgatgcaaaaattaaaacgtgcttatgaaaatacattgatcaaatggacgtttcatacgggcttttattttctgatattagtattgctcttttggatgtatggatttcatacagcgaataccggcacttatatttacaacgatttctaatcggggaggataactatgaaactacttgatgctataaaaacatacgcagacgccaagccgcaggccgaagcgtttcgttccttagatcattccctcacttacggggaattatgggatttgtcggagcgggttgcgtccggcattcaaaaacatacagctgacggttcgaaagcgcctgtcctggtttacggacatatggagccgaatatgatcgtttctttcttaggaagcgtcaaagcgggccgcccttacatccctgtcgatgtttccattccggcggagcggatcgtcaaaatcattgaaagctcaggcgcagagctgcttatcagcgtatcgggcgatgcagtcgatacgggaagcaatctgattaaaaccgttacgcccgaagagcttgcagctgacggagatgcagacctcagccgtgagaactgggtaaaagagctggacacgttttacattatttacacgtccggcagcacgggaaatccgaagggcgtgcagatatcggctgataacctgcaaagcttcactgactggatctgcagggattttcctgtgggcgagggtaagacattcttaaaccaagctccgttttcttttgatttatctgtcatggacattttcccgtcgcttcaaacgggaggtacgctgcactgcgtaacgaaagacaaaatcaataaaccgaaagtactatttgaagagctggagaaatccaaactgaacgtctggacatcgacgccgtctttcgtccaaatgtgtctgatggaccccggctttacgcaggagctcctgcctgaggcagaagtatttatgttttgcggagaagcgcttccggctgccgtggcacaggagctgttaaaccgttttccgaaggcccgcgtattcaatacatacggcccgactgaaacaacggttgccgtcacctccgttgaaattacgcagcagatcattgatgaaaatgaatctctgcctgtcggttttgcaaaacccgatatggatatcttcatcatggatgaaaacgggaataagcttccggacggtgaaaaaggggaaatcatcatcgcgggcccgagcgtaagcaaaggctatctcggagaaccttctctgacggaaaaagcgtttttcccgatcgacggccagtgggcatatcacacgggtgatgccggttatgttcaggatggtcagattttctgccaaggacgccttgatttccagattaagcttcacggctaccgcatggagctggaggaaatcgaagtacatgtaaggcagtctcaatatgtgcgcacggcggttgtcatcccgtatcagcctaacggacctgtcgaatatttaattgccgccatcgtgcctgaaaaacatgattttgaaaaagaattccagctgacaagcgccattaagaaagaactggccgcttcgcttccggcctacatgattccgagaaaattcatttatcaggaccacattcaaatgactgcgaacggaaaaatcgaccgtaaacgcattggcgaagaggttcttgtatgacgccttacagctcgtttttcttctttatcttacttggaatccttcttttgccgacgattattttagggctgaacggcaagagattccaaggatacaacatgtttatatccatcatcgtattggctttgattttcgcgcatgatctgcacggcgtgatcgcactatgtatctttacgctgtggcaggtgcttttaatcaggggttatctcgcttacagactgaaagccaacagcggctttgtcttcagtatggccgtgatcgcgtccattttacccctgtttttatctaaattatggccgtttttctttccgccggcgcctcatcacccggttcataacctgatcagtttcttaggaatttcttatttgacatttaaaggcgtccagctgatcatggaaacgagagacgggctgattaaagaaaaaatgccgcttcaccgccttttgtactttattatgtttttcccgaccatttcttccggtccgatcgacagataccgcagatttgccaaggacgaacagaaagtatggacaaagggagaatacgctgatttactgtataccggcattcataaaatttttatcggtttcttatacaaattcattatcggatatgcgattaacacgtatttcattatgaatctgtctcatatcacccacagcaaactgtggggtaatgtgctgtacatgtacggatacagcttgtacctgttttttgattttgcgggttacacgatgtttgccgtcggtgtaagctatatcatgggtatcaaatctccggaaaactttaataagccgtttatcagcaaaaacattaaagacttctggaaccgctggcacatgtccttatccttctggttcagagactacgtatttatgcgctttgttttctggatgacaaagaaaaaatggataaagaaccggatggccgtctcaaacatcgggtatttcctgctgttcatgctgatgggcgtctggcacggactcgccctgcaatatattgtatacggcctgtaccacgccgtattaatgaccgggtataacttttttgagaaatggaataagaaatacaagtggctgcccgccaatcgttttacggcctttttagccatcgtcatcacattccatttcgtatgtttcggattttatattttctcaggaaaaccatttcatcactaaaggagattgaaaacacatggaatttaaacaggaagtattagacgtattagctgaagtttgtcaggaggacgctgtgaaagaaaatcctgatattgaaatctttgaagaaggactgcttgattctttcggaactgtagagctgctggtcgccatcgaaaaccgcttcggcattacagtgccgatcactgaatttgaccgtgacgagtggaatacgccaaacaacattgtaaacaaactgactgagttgaagtaaatgaaaaagcgtttctttggaccaattattttagcgttcgtcctgtttgtcggagctatcgcagttccggcttcatggcttacgcgcttcattcctgaaaaacgtgtcgaagagtcggcggcagccttaaatccgaatatgttccagggactctatcttcaaaacaaaatgttcgaagactcgaagtatatgccgattttcggttcttccgagctttcaagactggatgagtttcacccgtccaactatttccaagtgaacaaccaaggctttacgccttatcttgtcggaaaaggcggggaccaatccttgatacacgccgtgaactttgcggcgcattatcagcagctgaagggcaaaaaactggtattcattgtttctccgcaatggtttatcaaaaaaggttctgatgaacagcactttgcgccgaatttttcatcacttcaggcattggatttagcatttaataaccagattgatcccgcggtcaaaaagaacatgatgaagcgcatgctccgttttaaagtcgttcagcatgatgccgtcctttctgaattgtacaagggaatggtcaacggacaatcatggaaagtgaaagcggtcatgccggctgccaaagcttattattctctgcttgagaaaaaagatctttattattcaatgggagaaaacaagggccctgaacggacgatctctgaaaacctgaaagggaaatcgtggtcagagttaaaaacagccgccgctcaattaggagaacggagctccaagtccaatcctttctatatcgatgacgcttcttataaaaagattaagaagaaagtaaagagagtgaaaggaatcaacaaaggaagaacatacgccaaatcagtcgaatatcacgactttgaggatatgctggacattctgaaagatgcaggcgctgaaccgatgttcgtggttattccggtcaacggaaaatggtatgactacaccggcttcccgaaaaaaggccggactgattactacaaaaaagtcactaagcaaattaaagcgaagggctttcaggttgccgacttatccgggcacgaatatgatccgtactttatgaaagacaccatccatatcgcctggaagggctgggtgtacgtcgataaagcaatggagcagttttacaaaaccggcaaggtgacggttcactgagcacggtgatgacagaatacgtaaaaacgaacacgcagggggcattctctcccctgctttttatgtgattttgattttttcacaaatttgaggaaaactattgcgaatatttgttgaaggtatacaatagaatataaattattttcaaataagtttgacaataacaccaatagggagacagaacattatgaaacaagatattcgtgttgaattcacttcagccaaaaaaccgaaaccggacccccatgaccttgcgttcggcagaattttcaccgaccatatgtttgttatggattacgacgccgatcaaggctggtatgatccgagaattatcccttatcagtccatctcaatggatcctgcggccatggtttatcattacggccaaaccgtttttgaagggcttaaagcgtatgtaacgaaggatcaggaagtgcttctgttcagaccggagaaaaatatggagcgcctgaaccagtcaaatgaccgcctttgcatcccgctcattgatgaagagcttgttcttgaaggcctgaaacagctcgtagccatcgacaaagactggattccgaaagcggaaggcacttccctttatatccgtccgtttatcattgcgactgagcctttcctcggtgtagcggcatcccatacgtacaagctgtttatcattctttccccggtcggctcttattacaaagaaggcattaaaccggtaaaaatcgccgtggaaaacgaattcgtgcgcgccgtcaaaggcggcaccggaaacgcgaaaaccgccggcaactacgcatcaagcctgaaagcgcagcaggttgcggaagagaagggattttcccaggttttatggcttgacggcattgagaaaaaatacatcgaagaagtcggcagcatgaacatcttcttcaagatcagcggcgagatcgtgacgccggagctgaacggaagcattcttgaaggaattacgagaaattccgtcatcacccttctcaaacattggggactgactgtgtctgagcggaagatttcgatcgatgaaatcatccaggcgcatcgtgacggccgattggaagaaacattcggaaccggtacggctgcggtcatttctccggtcggcgaactgatctggaatgatgaaagtcttgtcatcggcagcggtgaaaccggagagatctcgaagaaattgtatgataccattacaggcattcaaaaaggcgcggaagccgacgtgttcggctggacgacggaagtcgcctcactaagcgaatcaaaataagcaaaaaacccggaagcgaatccgggttttttttactgctcttatgcttcaatcgacttaaagaaatgaggcagatgatctttgtgggcctcaagcatttcatccagaatggcctttgccacggagtctgacgggacgagaggattgatcgtcatcgcaagtagcgccgtttgataatctcccgtgacggctgcttcagcggcgacacgctcaaatgatttgatttgctggacgagtccgcggacagacaccggcagatcaccgacggcgatcggtttcggaccgtctttcgtcataacacagttcacttcgaccgctgagtcattcggaatgctggcgatcgcgccgttgttgatcgtattgacgggctggatatcatgtttgtcgttatagatggagctgatcaggttgcaggccgcgtcactgtagtacgctccgccccgtttttcaagctgcggcggtttaatggcgagattcggatctttgtacagttcgaacagttctttctcaaccttctgtacgacctcggcgcgtgtgccctccgtctgtgacgcttctatttcatgctcgagcatttctttcgttttgaaataatagcggtggtagccgcaaggaatcagatcgagcgccttcaggaattcaggctcccattccgcccctgaaatatttttcatcgtcatggcgtttttcgggtctcccatggcttcaatgacttgatctttcacgctgacgccgtctaagaaaacatctaatccgaagaccatatgattcagcccggcaaattgcacttcgatccggctgacatccacgtccaatgcttttgcgacgcccattttaatgccgatcggcacattgcagaggccgacgacttttgtgagattcgagtagcggagcaaggcctcggtaaccatgccggcagggtttgtgaaattcacgagccatgcattcggacaaagctcttcgatgtctttcgcgatttccagaataatcgggatggtgcgcagccctttgaataaaccgcccggaccgtttgtctcctggccgattacaccgtattttagcggaatccgttcgtctttggcgcgggcctcaagaaggccgacgcggaattgagtcgttacgaaatccgcatccttcaaagcttctctccggtcaagcgtcaggtgaatctctatcggaacacccgctttttcgaccatgcgttttgcaagcgtgccgacgatattgagttttttctcgccttcgggaatgtcgacgagccataattctctgacaggcagttcctcatagcgtttaatgatgccttccacaagctccggtgtatagcttgaacctccgccgatcgttacaattttaattccttttgtcatattttcgctcccccttgcagactcactttttcgtaaatctcgactaactcagcggccaagtctttcacggtcatggcattcattaaatgatcttgcgcatgcaccattaaaagcgtcatgtctgttttttctccgccggcttcattttggatcagttctgtctgataatgatgggcttccgtcagttcccttgcggcttcctgaagcttttcttccgccatggctctgtcccccctctttgcggcggcaatggcttccattgatgcgcttctgccgttgccgccatgcaggatgatctgaaaaatggtctgttccattttttcattcatgtgtttcactccctttctctacagcacggctttttcgtctccctgtacggctggcgcctgcgattgttcaagttcgttttcttctttcagcttttgcgaatcccacattctgaagaacggatagtacacgataaaggctgtgatgatattaatcgcctgcatgacagcccctgatatttttccgcccgtggcaagatagccggagaaaatcggcggcatcgtccatgggacggcaatgccggcaggtttggcgacgaggccagtgctcatgccgatataggtaaggaccagtgtgacaagcggtgtgataatgaacggaatgagaagcatcgggttcatgacgatcggcattccgaaaataatcggctcattaatattaaagacggccggcccgatggcgagtttcccaagctgcttcatctgcttgcttcgcgaacggagaaacatggtgaccacgagcgccagtgtcgcgccgcttccgccgatgttgatccagatttcaaaaaactgctgggtgaaaatattcggaagcgcatcgcccgcctgaaacgcaatccggttggcatccatcgctccgaaccagatcggcgccatgacgccgccgactatgttcgccccgtgtaatccgcacgcccacaagagcatttgaaccgcttcggctatcaggcttccgccgagacttcccccaagaatcgagagcggtgtccccagtacaacgcttacaatgttatgaaggctttcaaacggtgtcgcttcgacaattaaacgcgcgccccagatcagaaagatgacggcaaaaccgggaattaaagcgataaacgatttgctgaccgcaggaggcacgccgtccggcattttgaagacgaaattccgctggatgatcaggcggtaaatttccgtcgacagcatggcgatgatcatcgcgacaaacagccctttgcttcccatgagagacagcgggatgccgccgccgaccatgatttcctctttggcgccggaaggcagaaacggaactttgtacggcgttgccaagagaaacgccgccaaagatatcgcaccggccgataatgcatccaccccgtatttttcggccaggcggtaggcgattccgaaagcggcgacaagacccatgatttcaaaggtcgcatcaaccggatattgcagtttttgagaccaggcgcttccgaacgtctttgccatgaaatccgcatatcccggaatcggcaggttgccgatgatcagaaaaaatgaaccgatgataataagcggcatggtgaggatgatcccgtcacgcaatgcttgcagatgccgctgggaggcaatttttccggcaatgggcatgactttctcttctaaaaactggttcaccttattcacacggcccgcccctttctacgatgcgtttccgagctgttccgctgatttcagaacctccgctccgttgcatgtgccgtaatggacagtattgatgacttcaaccggcactccttttgattcacccaattttttcagctgcggaagcaaataacggacttgaggcccaagcagcaatacgtccgctttatcaatatgctggttgactgaatcgcctgacaccgcccagattttatattcttttccttgttcctgcgcgcttttttccatcttggtgacgagtaagcttgttgacatccctgctgcacaaacgagtaatatattcatgtaaaagacctcctgaaagtttgatattttgtatgtctcgatgttagtaccatcatattatgaaatcgctttcataactactcaggctttttccgctgttaacggaaaaaaggtgtatcccggtctttctctgatcgtttgtctctgaatactcgtaaaacctcctgataggttgtgcattttaagagacggcttaccgcggccggatcatctaacatgccgccgagccatttgtacatatgctggaggtcggctttgctttctttctcgacgcagagcaggcagacaaattggacacgcttatccgcccagtcaatcggcttcttcagcgtgcataccgcccaaaacgtcgtgtctgtctgcggaacgagcgggtgcggaatcgccgtaagattgccgaaactcgtaggagaaatcgcttccctttcaaaaatagaatcggtcagagaatcagaagcgaggccggctgctgcaacctgctgtccgagaaaacggatgacgtcctccttcgtctccagatcctgctgcaaaaataccagctccggtttcagaaagttcaattgttcccgcttttcttccagcatggcgtcgatttttgtaaaatccccgccgcccaacagcgtatgaacctttaatacgggaacgggcaggtcttttttgatcggcactgtgctgaccacaaaatcaatcgactcaaaggaaagctggtcaaggctgcagtaatcagccgttccgacgatttcaagacgctttgcgaaccgggaacggagcttttctcttaaaagctgtgcgctgccggcgccggacgcacagacaatcaagcagcgtttaggcggccgttccgtctttctcctttcaatggcggctccgaaatgaagcgccaaatatccgatctcattctcatgaatatcaatgccggtttgctccttgatcacgattcccgcaatcactcccgcttcaaatgcgagcggataattttcctttatggcggagagcatcgggtttctcaggttcattccgtaccggtttcggttaatcgccggcttgatgtggagcgcaagacccgctttcagctcattgtcgtccgtgattccgagcttcagctcccgctcaatggcttcgatcatggcctccgtcaaacggctggtttccccgtctatcagccttgtaagctcttttccttccagttgtgactgggtcatgcgctttgtcccgagcaggtgaatggcgatataggcggtttcctgttcgggaaaggtgaccgaaagcgccgattcaagctcttttacgatggcttccgctgactgatattctgtttcaagcttaatatcatgaagatcttccggaatgagagatacatagttttctgtccggatacgtttgcaggcaatggcgatatggatgatgagattgttcaggccgaagaaagaaagcgggatcttatggtttcgaacctgcttcataatggctgtgcggatcacatgaatgtcgtctttcggcagaataccggccttttcactcaggagatcaggctcaggctcgcggtcgtccactaagtattccgccatacaataacggaggcggagctcttcgccgcgcagcttaaagccgtagttcggccttgtttccaaaatgatgtcataggggcggagccgttttttgacttcttttaaatcagattgaagtgtggatttactgatgaacagttcttccgccaagtcatccagcttgaggtagccgtcggccagaagcattcttttcataaggtaatctatccgttcatcgggaaaaatcggcacggtgctgttctgctggaaattgtcctgaagccagtttttaaacggctgctcattccggatcagcagcttatagccgctccctctgacagattgaatggatgcgccgtgtttttctacaatggtttgcagttcctttatgtcattgcggaccgtccgcgtcgttacctttacatttgcagcgatgactgagcttgtaaccggtgtttcagcagctaaaagcaagcgcagaagttcacgaagccgcccatgaagcatgagaaaaacctcctatcagatcagatgcagacgtgaaaaatgggcaaaaagaatgaggaaggggtaaatgtatgtaaattctataatggggaggatttcaagtcaatgcggcaatccgatgccaagcccgtaaaaaaacagccggatcagccggctgttcgggatgcggacatgcggttccgcttagatgccttccgttcttttatgatttttctgatgatcggatagatgacgggcgcccatttgataatcgttttgaaaaattttttcaatgtctgaatcccctttcttttaccttgtctttcccctgttatcagcgtttataaacatggtcagcgtgagacataccggttccccgtcacccaatagcgccacggataatcccgggcttctccgctgttgtcaatcccgattctcgggcctgttgatatatgctcaggcgtaaagccctccgtaatatacagcggcggttccgtgatcatgccgccgtagtcgttcattgaaatgcccatcgccttcgtcagttttcccgggccgtttgtccactctctcggaggtctgcccggtctcctgctctccatcaggaactgtccttcatgaggctccgccgccctgattaacacggcctgcggaatgccgatgtccgcggcgacgacgttcattaatgtatgagtgtgcatgacgtatgtataaatgcggcccgcctcatggaacataatttccgtccgtttcgtgcgccggttgccgaagctgtgcgccgcccggtcttccgctcccatataagcttccgtttccacgataaaacctgaagccgttccctcatccgtctccttcaccaagagacagccgagcaataaaggggcaagctccactgacggtctctggtaaaattcaatcggcaaaggctttcgttctcccgccatttgcctccctcctttctaatatagcgatttcctctttcacgtttttcacttcttttttacaatataaacatgagagaaaaaaaggacattattgttgaacgctctattgcgttttgaaaatcggctcggtataatatgatggttcaaatgaaaatgattctcatgttcaataaataccggacaatgatcataaaagtaggtgaattgatttttgagcgattctgtcaggtccgcaaaccgtctgatcagcatcttaaaaaacggggttttcttcctgatcgcggtgatcgggctgcttgtatctatttttttcgccgtctcattcggcgcgaaagacattactttacatacggtttggtcggctgttgctgattacaatccgaatataacgggccagcagatcattcatgaattgcgtcttccgagggtgctcggggcggccgttacaggagccgcttttgccgcagccggcgccctcatgcagggtgtcacgagaaacccgcttgccgattcgggagtcttaggcgtaaacgcgggcgccatgtttgttgttgcgctcagttttgcttttttccctcatttatcatacgccctgctgatggtgatgtcatttttgggagcactggcaagcaccggcttgattttctttatcagtgcggcgggaaaaggcagcatgacacctttaaaagtgacgcttgccggggcggtcgtggccgctcttttacattcactcagtaccggtgtggcgatttattacgatttaagccaggatttggccttctggtacgccggcggggtgtcagggatcaagtggactcatttacaagtccttgttcccgtgattgcggtcttcatcattcttgcgacattcatgggccggtccgtcacccttctctcaatgggaaatgacgtggcggcgaatttaggggtgaacacggctctgacgcgtgccgccggattaatgatcgccgtcgttcttgccggtgtgtctgtttccgctgccggcgcgatcggctttgtcgggctggttattccccatatcgcgcgaaagatcgtcggcgttacgtacaggctgattattccgatgtccgcgttactcggcgcgattctattgattttggctgacctggcctcgcgcacggtcagtcccccgagggaattggcgataggcattatggtcgcacttgtcggtgtccctttctttctttatattgcccgcaaggaagggagagacttataaatgaaagtgcagaaagaaacaaaaaaagcggcggcggcaggactcattctgctggtcatcgccgtttgcattattctgatcgggctgcatacgggctcattccggctttctcctctcacggtgggaaaaacgctgttcggatacggcacgtttcaaagcacaaccgttttattcgattaccggcttccccggattctggtgacgatgctggccggcatcggtttaggagtgtcgggcgctattttgcagggtgtatcccgaaatccgcttgccgatccgggcattctcggactgcatgccggcgcttccttcggtttgatgatgtatatcacgttctttcattccctggaggcgcaggcatcgatgttcatcccgctgtttacgtttgcgggcggaacactcgccgccctgctgatcgtagtgcttacgtacgacaggctgaacggttttttaacgatccgcatgctgttagtcgggatcgccgtttccgcgggcttcagcgccgttacattgtttatgtcgctgcgactgaatgaagaaacttatacattcgcttcccgctggctggtgggaaacgtctggggcagggattggattcacgtgtggtcgctattgccctggatcggcattctcgcaccgcttgcatggcttaacgcccgctctttgaatattttaatgctcggtgaccaggcagccgcggggctcggcgcacacgtgcagagaaaaaggatcatgctgatcgccatagcggtcggcttgtcctgcgcgagcgtcgcgatggccgggggaatcggctttatcggctttgccgcccctcacttggcaagacggctcgtcggcaccatgcatcagcatattatcccgattgcgggattaatcggactcgtcattcttgtcgcggcagacaccatcggccggtctttgtttcagccgaacgccattccggccggcgtggttgcggcagccatcggcgcgccgtattttctctatctcgtcatgaaaatcaaatcataaaacaaggagtattcccatgaaaaaaataattgcgctcgtcagtttcatgtgtattttcttattggctgcctgccaatctgattcaacacagccggagtcaaaaaagaaatccggcgatcataaaatcgcttcgatgtccattcacctgacaaatgatctgctggctctcggcgttacacctgccggttccgtcgtgggcggagaattaaaagattttctccctcatgtgaaaaatcagctgaaagacacgaaaaaactcggacctgcctcagacccggatatggaagctttacttgagttgaatccagacaacatttatcttgataaagaatttgcgggaaaagatgtgtcaaaatacaagaaaatcggaaacacacacgttttcgaccttgataaaggcacttggcgcgatcatttaaaagacatcggaaaaatcgtcaatcgtgaaaaagaagcgaaaacatttattcaagattacgaagatgaaacaaaacaagtcagatccatgatgaataaggaattagggaaaaacgccaaagtcatggcgatccgcgtgaacgcaaaagagcttcgcgtcttcagcacacgccgtccgatgggaccgattctgtttgacgatctgaagctgaaaccggctgacggcattaaagaaatgaacacctcccgcccttatgaagtcatttctcaagaagtgctgcctgattacaacgcagatgcgattttcgtcgtcgttaacagagacgacaagtcacagcaagcctataaagaattgcaaaaaagcgctgtatggaaagggctgaaggccgtgaaagcaaaccacgtctataaaattgccgatcagccttggcttgattattcagcactgggaaataaattagcaatggatgaagcgaaaaaactgttccaaaaataaacatgagccggttttgcaaaaagtgcaaggccggcttttttatattgtcgtttacttatataaacatctgcttatataatagtgtaaaaaaggagtgagcgcatggaacggaggcatcatgctttaagttccgaagggatcagccagtgcctcaaacttctaagcgacccgacgaggcttttgatgctgaagcttctgaaggataaggaatattgtgtctgcgagctgacagctatttttcatataagtcagcccggcatcagccagcacttgcggaagttaaagaacgccggccttgtgcgggaaagacgcgagggtcagtggcggtactatgccattcatccgtccggtccggaatacgcgctggtttgctcgattctgcagcagatagatgaaaaggacgaagttttacagacattgcggcaaaaagaagtcactgttacatgccggtaagggggatatatcttgggagttgcggttttatcagcgctgatttttgtgctgacacttgtgtttgtcatatggcagccgaaacatgtatcaatcggctggtctgcctgcggcggggcggtcctcgctttgatcgccggagcagtcagcctgcacgatatcgcggaagtgacgggaatcgtctggaatgcgacacttgcctttatcgccattattatcatttcattgattcttgacagtatcggtttttttgagtgggccgcgctgcatatggccatggcggccaagggcagcgggctgcggatgtttctctatgtgtcggtcttaggggctgttgtctccgccctatttgccaatgacggagcggcgctcattttgaccccgatcgtactggcgatggtgcgggctttgaatttacctgaaaagctggtttttccttttattatcgccggaggattcatcgccgacaccacctcgcttccgctcgttgtaagcaatttggtcaatattgtatccgccgattactttcatatcggatacattgaatatgcatcacgcatgctggtgcccaaccttttttctctggcggcaagcattttggtgctgtatctctatttcagaaaaaacattccgaaacggtatgacaccggtcttgtgaaacatccggcatccgcgattaaggatgaacgccttttccggttatcgtgggctgtgctggccgttttattgatcggatatttcgtcagcgaactgctatcgatacccgtttccttcgttgccggctccatcgcggtcatttttctcattctggcgcagcgaagccccgccgtccctgcgaaacaagtcatcaaggacgccccgtgggccatcgtgtttttttctgtcggcatgtatgttgtcgtgtacggcttgcggaatgccggactgacggatcttctttctcagcttatacagaaagcggcggatcacggtttgtttgcgggcacactcggaatggggtttatcgcggcgatcctctcctccgttatgaataacctgccgacggtgatgattgacgccatagccatcagcggaacggaaactcacgggctgatgagagaagcattgatttacgcgaatgttatcggttcggacctcgggccgaaaattacgccgatcgggtcgctggcgacgttgttatggctccacgttctgagccggaaaaacgtgaaaatttcctggggaatgtatttcaagacaggtctgatattaaccattccgacgttattcatcaccctgatcggactttatttatggctgttatggctcgcttgagatgaaaaaccttttaagttgaatcttaaaaggtttttttgtgtcaaaaatccgaaaagtaaaacttttatattttaaaagtatagacatttaatttcaaaagattataatattcatgaaaacgttttaactttatgaaagaagggattcctcatgaaaagaattttattagcctgcagctcaggcatgtccaccagccttcttgttacgaaaatgcagaattacgcccgctccatcggtgaggaagccgagatttgggcagtcggacaggataaagcaaaagaagcgatgaaagacgcagacgtcgtactgatcggcccgcagatgagttttttaaaaggtgagcttcaaaaagatgcggacccgcttcacatcaccgttgatgtgattgacatgatggcttacggcatgggagacggcaaaaaagcatacgaacaggccgttgccttgatagagaacaaataaaggaggcgataagcatggaaacgtacacggatgaacagataagttttcagctgattcttcacagcggcaatgcccgcagcaatattattcaatcgatacgcgcatataaagacggccggacagatgagtcagacacctttctgacaaaggctgaagaagaactggggaaagcgcacgacatccattttcagatgattcaaaaagaagccggcggcgccaagacggatgtctctctgctttttatgcatgctgaagatcacttaatgtcagcgctttcaatgaaagagctcgtcaaagaaatgctcgacttatttcaatcaaagaatttataaaaagccgggggtgaagacgtgtttgagaaaatcagccaattccttgttccgatcgcgggaaaattaaacaataaccgctacttgcaagtcttacgggatgcttttatgctggcgtttccgctgaccattttcggttcggtgttcgtcgtgctgacgaacctgccgtttttaaacaaaatcatgagcagctccgccctgtctgtctttcaatccggatttggcggcgcttcgacggcgacgatggggattatgtccatttttgtcgtcttcgggatcggctattacctttccaaaagctacgaagtggaggccgtattcggcggggcgatcgcattggtttcttttctgctgctcaccccgttcgttttagagccggaaacgggcaaagcggtcgcaggcgtcattccggttgaccggcttggagcaaaagggatgtttctcggcatgatgaccgcgtttttgtcaggtgaaatctacagaagaatcgttcagagaaacttaacgattaagatgcctgccggtgttcctccggctgttgctaaatcgttcgccgcattgattccggcttttatcacgcttaccgtcttcctcttgatcaatgcggctgtcacccagatctttcacaccaatctgcatgatgtcatttatcatacggttcaagccccgcttgtcggacttggaagcggcatcattcctacattaatcgctgttttctttattcagattttatggtttttcggacttcacggacaaatcattatcaattccgtgatggacccgatttggaatacattacaggtcgaaaatttggcagcgtatacagcggggaaagagattccccatattatttctaagccgtttatggagatttacaccgtcggaatgggcggaaccggaatgacattggccatagtgatcgccatcttgctttttatgaaaagcaaacagatgaaacagatatccaaactcggtctcgcgccaggcattttcaatgtcaatgagccggttattttcggtttgccgatcgtgatgaacccgatcattatcattccgtgggtgatcgcgccgatggttgtcacccttgtcacctacctggccatgtcggcggggatcgtgccccctcctaccggcgtgaccgtgccttggaccgtccccctattcattaacgggattatggcgaccaattccgtcatgggcggcatcatgcagctggtcaacctctgtattgtgtttgtcatctggttcccgtttcttaaagcgctggacaaattaaacatggcaaaggaaaaagaagctgagaccgagcagcatgcccgggatgacagcatgagtatgtaatcaaaatcgcagtaagggagagaaatcaattgactgaatcaaatattcaatatcgttttccggaaggattctggtgggggtcttccgcctccgccacccaaacagaaggcgccgctgacagagacggaaaaagccaaaacatatgggattactggtatgaaaaagagccgagccgtttttttaacggcgtcggccccggcgacacgtcacgtttttacgatcaatacaaggaggatatccggctgatgaaagaaatcggccataactccttccggctgtctatttcctggtcaagattgattccggacggaactggcgaggtcaatcagaaagcggtcgcgttttatcaggacgtcatcgatgaaatgcttgcccatcgcattgagccgtttgtcaatttgtttcactttgacatgccgctcgcccttcagcgtaaggggggctgggtcagccggaacaccgttgacgcgtttgaacattacgccaaaacctgcttttcgctattcggtgacaaggtgaaaaaatggttcactcacaacgagccgattgtgccgattgaaggcggctatttatacgactttcactacccgaatcacgttaattttcaagaagcggtgcaggccggtttccataccctgctgtcgaatgcaagggctgtcaaagcctacagagaattgaaacaggacggacaaatcggaatcattctgaatctgacgccttcttatccgagaagctcacatccagaagatgtcaaagcgtcccggattgccgacgcctttttcaaccgctcatttttagatcccgccgtaaagggcgaatttcctgaggagcttgtcgagattctcaaggcggaaggctttctgccgcattatgagaaagaagatctccgtctcattcaggagcatacggttgacctgttaggcgtgaactactatcagccgaggcgcgtcaaggcaaaagaacatgttccgaatccgcatgcccctttcctgcctgagcgtttcttcgacccgtatgtcatgcccggccggaaaatgaaccctcaccgcgggtgggaaatttacgaaaaaggaatctacgacattctcaccaatctcagagaacattacggaaatatcgagtgttttatttctgagaacggcatgggagtagaaggcgaggaacgcttccgcgatgaaaacggcatcattcaggatgattacaggattgaatttatccaggaacatctcaaatgggtgcatcgggccatcggagaaggttcaaatgtaaaaggctatcacctgtggactttcatggacaactggtcttggacaaatgcttataaaaaccgttacggctttgtatctgtcaatctggaaaacgggggcgaacggaccgtcaaaaaaagcggccgctggttcaaagccgtttccgatcaaaacggattttaacagatgaggagggacggccatgcttggaggtattgaagccggcggcacgaaatttgtctgtgccgccggacaaagagacggcaccattctggacagagcagagtttccgacgggagaaccggatgacacactcagacaggtcatccgttactttacagatttcccgatagaagccatcggcatcgggtcgttcgggccgattgatatccgtcctgacagtcaaacatacgggtgcatcaccgcgacgccgaagacagcctggcggaactgccctattcttcaaacgatcaaaagcgctctgggtattcccgcaggcttcaccaccgacgttaatgcggcggcgctcggagaagcttctttcggcgcggccaaaaacgcggacagctgcctgtatttgacggtcggcacaggcatcggcgcgggcgccatcatgaacggcagatttgttcaagggctgtctcaccctgaaatgggccacatttatgtcagaagacatccggacgacggctacaaaggcaattgcccataccatacagattgtctggaaggcctcgcggcaggccccgccattgagaaacgctgggggaaaaaagcatttttgctcacggatcagcaggaagtgtgggagcttgagggctattatattgccgaagcgcttgtgcagtacattctcatactttcgccggaaaagatcattctcggcggaggcgtcatgaagcagcggcagctgttctcttctatccgtcagcacgtgaaaaagcggctgaatcaatatattgatctccctgatattgaaaaatacatcgttccccctcaattagggattcactccggcgcggccggttcgctcgtattggcggagcaggccttagaagcggcaaaccgggaggcgggaaaatgacgaaactcttatttttggaaccggtttttaaagaaagattatggggcgggacgaagctgcgcgatacattcgggtatgagattccttctgagcggacgggagagtgctgggcgatttcagctcatccgcacggtacttccattgtgcggaacgggccttttcccggaacatcattacaccgtctctggaatgaacaccctgacctgttcggacatccgaaagaggacgcctttcccctgctcacaaaaattcttgacgcaaatatggacttatccgtgcaggttcatccggatgacgcatatgcacatcggcatgaaaacggagaactcggaaaaacggaatgctggtacgtgttggactgcaaaaaagacgcggagctcattttagggcatcgcgcccaaacgagagaagacttcgttcggctcattgaacgaaacgagtgggatcacctgctccgccgcatccccattaagcccggcgactttttctatgtcccgagcggcacactgcacgctttatgtgaaggtacgctcgttcttgaaatccagcaaagctctgatgccacctaccggctttacgactatgaccggacggatgggaacgggaataaacgcgagcttcatcttcagaaagcaattgacgtaacagacattccccataccgatgaaaatgtaaaaagcacaaagcatcagatcggagatgctcttattacaacactcgcagaaacacctttcttttcagtttatcaatgggatgtgagcggaaaagcatcatttcccgcacccggccggtatttactcgcaagcgtcatgaaaggacgcggagaactggatggatgtcccattcacaaaggcgatcactttatcgtgccggcggattccggagattttgttatagaaggagattgtgaggttatcgtttcacatccttcatcatcctaaaaatcaggaggtcttttatatgctcaaaaagttagcagtctgcctgtctatcgttttattactcttaggagccgccagtccgatatcggctcacaccgtttatcccgtcaacccaaatgcccagcagacgacaaaagatatcatgaactggctggcgcacctgcccaaccgttcagaaaacagggtcatgtccggggcgttcggcgggtatagcgatgtcactttttcaatgacagaggaaaaccgcttgaaaaacgcgacgggacagtctcccgccatctacggctgtgactatgggagaggatggcttgaaacagcggatatcaccgattctatcgattacagctgcaacagcagcttaatctcatactggaaaagcggcggcctccctcaggtcagcctgcatctcgcaaatccggcttttccatccggaaactataaaacggccatctcaaacagccagtacaaaaacatcctgaacccttcaactgttgaaggaaaacggcttgaggcgctgctcagcaaaatcgccgacggccttactcagctgaaaaatcaaggcgtcaccgttctgttcagaccgctgcatgaaatgaacggcgagtggttctggtgggggctgacaggctacaaccaaaaagacaatgaaagaatctcgctgtacaaagagctttacaagaagatataccgctatatgacagagacaagaggattggataaccttttgtgggtgtattcgccggatgacaacagagactttaagacagacttttacccaggctcatcttttgtggatattaccggtctggacgcttacttcactgatccgtatgcgatatcaggctatgatgaaatgctgtctctgaaaaaaccgtttgcctttgccgaaaccggtccgtccggtaatatcggaagctttgattatgctgcttttatcaatgcgatcaggcaaaagtatcccgagacaacgtactttttgacatgggatgaacaattaagtccggcggccaatcaaggcgcgcaaagcctttatcaaaacagctggacgctgaacaaaggcgaaatatggaacgacgggtccttgacgccgatcgcggaataactgcttcttttgaaaatcggttttaagaaacggctctgctgggcatattgttaccgttcaaaaaggagggttcaacaatggaaaataacaaaaacagcgaagaaacgctttccagtaaaacgaccggtaaaggcgagtcagaagacacgctgacaaaccggcagggccatccggtcactgacaaccagaatgtcaggacagtcggcaatagaggaccgacgacattggagaattatgattttttggagaaaatcagccactttgaccgcgaacgaattcccgagcgcgtcgttcacgcgcgcggcgccggggcacacggatactttgaggcgtacggaagttttggagacgaggagatttctacatacacaagagcgaaagtgtttcaaaagaaaggaacgaaaactccggcgtttgtgcggttttctaccgtcaaccatggaaagcattccccggaaacattgcgtgatccccgggggtttgccgttaagctttataccgaagacggcaactgggatctggtcggcaacaacttgaaaatcttttttatccgtgatccgctgaagttcccggatcttgtgcacgcatttcagcctgatcccgttacgaacattcaggacggcgagcgtattttcgacttcatttcccaatcaccggaagcgactcatatgatcactttcttgttttcgccgtggggcatcccggccaactaccggcagatgcagggctcaggcgtccatgcctacaaatgggtcaatgaagaaggaaaagccgtgctcgtcaaatatcactttgaaccgaaacagggcatccgcaacctgacacagaaggaagcggaagagattcaggggaaaaactttaaccatgcgacacaggatttgtatgaagcgattgaaaaaggcgattaccctgaatgggaagtgtatgcgcaaatcatgactgatgacgaacaccccgagctggattttgatccgcttgatccgaccaagctgtggtataaagacgatttcccttggaagccgatcggtaaattggttctgaacaaaaacccggaaaactaccatgccgaggtggaacaagcgtcattcggaacgggcgtgcttgtggacggccttgatttttcggatgacaaattacttcaggggcggacattctcctattcagatacccagcggtaccgcgtcggcgcaaactacctgcagcttccgatcaactcgccgaaaaagcatgtcgccaccaaccaggaaggcgggcaaatgcagtatcgggtcgatcgggcagaaggacaaaacccgcacgtcaactatgagccgtccattatgggaggactcaacgaagcaaagcaggatgggaaagaccatacacctcatgtcgaaggcgatgtgaagcgggaggcgatcgaccggtcgaataacttcggccaggccggagaaacataccgcagattttcagaatttgaacggaacgaattgatcacaaacctggtcaatacgctttcttcctgccgcaaagacattcaggatcaaatgattgagaatttcacaaaagcagatccggactacggaaaacgtgtggcggaagggctgaagaaagccgccgaaagcaacagcggcgggccgatcggcactactgatacagcacaagccgcaaaacaggctgaacaggaaagccatccgtctgatccgtattaaataaaaaaacaggacaatcgcgtcctgtttttttttgagctaattcagctcctgtatattctgctccgccgcggccgcaaatactttcggctccggacggtcaagatcttcatggaataaacttactttgtgaatctgccggttgtcgtacagatgaaagtagtagttcccggtgtcacagcacatgaccgacgtatactgcgtataatcaatttcattctcctctgtgatcaccgcgccttttggaatattcacattggacagcacgtgaaaagcggccgtaacgccatccgtttcatgagcggcaggctctaaatgctctttcagataagcggctctgataaatcgggatggcggcgtgtaatcaccgggaagcccgatcgttccagatccttggccgaaagcggttaatgtcattccgcccaatgttttgctttctgactgctgcggcctgattccgatataatggcgcagattggtcacatgccaaggaaattccggactgttggtcatcactccgggtttgttgtcatatactttcattccctccggtgtcggctcgatgacaatgcagccgcccgtgcggtctgataaaatccaatgaagaggcagcaccgtatccaataacattaacttcttctctacaatcgtcagcattgagagcttttcctttatgtcttcaagagattcacagtttgataaggcccaggtgacaaactcatgaggagcgatgtgacaggtgccctcccgttccgctttctcgtatcccgcaaagcccggaaaatacagcgtcgcacacgacagccctttttcatttacgccgtcggcaaacagaacattgccgagatttctccccatgccgataaatgcgtatttcgtcttatgcatcctgccgtcagcttcgcttttccagctgtactgacgagggtaaagcacgatgtccgtaccgagctgatatgcaaaatccatcgttcgcgccaataggtgattaccgtctgtcgttttcaatgtaagacttgtacacatattatcaatccccttttcattaatgaaatttacacaaagtaaactattcttccagcttaacgaataatggctccattcgtcaaaagattgacacatttctccttaatacatattagtccgtaagcatatccatgccttttaaaccctggcaaatcgttttggcggcagtgtttgttccgtttttcaaaaaaacttttgaacggctgtcaacgaggctttacaatgtttttcctgcatgctggaatttgtaaacggcaggtcaatctgttaagctatgtctttatgttaaagaagaacatacggaggagattatctattgaaagtagaaaggcgaacgattgaacatattccgcatgacgaaagacacggaaaggctaaagatttattccccgtctggttcggggctaatatgcatattacgacgttagtcacaggcacactgcccgttacaatgggactcgatctcttttggagtatcgccgccattattatcgggacctttatcggcgcaatctttatggcgtctcattccgcacaaggacctcagctcggaattccgcaaatgattcaaagccgcgcgcaattcggcgtgatcggagcgattctgcccctctttttggtcatgtttatctacctgggcttctttgcgagcagtacgattctcgcagccggtacactgagcagctttgtaccgattccggcttcatggtgtattatcggcttaagcgccatctgttttttactcacgatctacggtcatgatctgattcacaaaatgcagaaaatcctctcttggacctcctttgccgttttttttgctgcaacgattcttatttttcaactgccgattccttcaggaagctgggtgcccggctcattagacctgcctgtttttctagtggcggtcagcgcggtggccacatggcagctggcatatgcgccatatgtcgcagattattcccgttatctgccggtcaaaacaccggcatcgcataccttttggtacagctacgcaggtacgtcagtcagttccatctggatgatgcttctcggcgccattttgacgacggcgctcccggaatttaccgctaatgcgggaaatgagattgtccgattgttcggtccgttttcctttattatgctgatcatcgtcctgttcgggcaaatggcgatcaacgtctttaatttatacggagcctttatgtcaaccacgactaccttggagccgtttttaaaactgaaggtgacgccgaaaacgagagtggtaatgatcctttgtgtgacggcagcaggtactgtattaagtctcttgggccaaagcaatttcatggaactgtttttaaatttcatctttttcatcagttatttcttaattccctggacggcgatcaacctcgtggattactattttatccgccgcggaaaataccacgtcaaatcgatgtttgacgtcaacggacaatacggcagggtcaattggattacagcggccgccttcgttttgtcgattatattagaaatcccattcatcaatacatccttttacatcgggccgctcgctgaaatattcggcggaggcgacattgcctgggtcatcggcctggccgttccgtcgctgctgtattatgtcctgatgaaatcaagggtaaaacaacaagaggcgccttctctatgaagacgccttttctttattcatattccttccatacacgcggcagcagttcagaaagttcgtgcgccaataaggtatgggcggagcgctctttcgtccataactccgcacattcaccgtgaaggcggacggcgttcaatacggcatgcttcgggtcttgatgacagcacagcatgccgagaatcattcccgtcagcgtgtcgccggtcccgccttttgcaagcgcgccgtttcctgttgtattcctgcggcattccccgtcgggaaaagcgataatggtttcgtttcctttcaggacaatcgtggcgtgaagccgctccgcccattccgcggcatatcccgctctgttctgctgaatctcttgaatcggaaggcctgtcattctggaaaattcgccgggatgaggcgtcaagatcacgggggctttcctctttggataggttcttttcgtaatggcgcccgcgtccagtatgacgggataatcggcagaaagcagctgatcagccgcctgctgcacttcgtctgtttggggaaggcccggtccgatggcagcggcccggatggtttccccgggctggcccgccgcggcttttttccagccgtcacgccagtacgtcgcttccggcagcaccgggacgataagcgggatgacgcctgccgatgtaccgatgacgagcttgccgacaccgcttctcatcgcgcccaatccggccagaagggcagctcccggcatgtcttcgctgccggccagcaataacgccgtcccgaacgtccccttatggctgtctgcctcccgcttcggcagcgtatctttcacatcctgttccgtccaatccattatattcatctctgtacctcctcttctgtctcctatttatattccaaacaagaagagattttaaaccgcacaaaaaaaacagccgcttgtttgcggctgtttatgttctgattggaacatcaagacggtaaagcttccggtaccgttcgttttctgcaagcagctcttgatgagttccttccatttctgcttttccattttctaaaaagacgattttatcagctgtttccacacccgctaaatggtgtgtaatccagaggatcgttttctctttaaagacatcaaaaatcgtatcaagcaattctcgttcagtgaccgcatcaaggccgaccgtcggttcatcaaggataatgaccggcgtgtcttggagcagaatacgggcaagcgcgatccgctgccgttccccgcctgagaaacgaatccccgtctcctgcacggacgtttcatatccgtcaggcaatgattcaatataatcatgcagcttcacttgccgagccgcacgcttaacatcttcatcactcgccttgccgtttccgagccggatattgttcataatgctcgtgttaaagagatgaggtttctgattcaaaacggccaccgctgaggaaatctgctcctgcacggccgcagtttccagcccgttcagcatcactttgcccgaatcgggaactaaggcgccttcaattaaagcgagagaggtcgacttaccggagccgctcctgccgagcagcgccattttttcaccttggcggagagtgaaggaaaaacggtcaagcacatgactgtgctgatcataagaaaacgtcacgttatcaaatgtaagtgtcacatccgatacatccagtttctcatccgtctgcttcacctcacgacttcgcagctccggagccgcctgactcattcttttgatggaatcctgataagaaggcacttccgtcagcgcatccgaaaggggcagaaacgcctccgtcaatggaaatacgacaagcacaaaggccgcgatcatcgtgttggcgatgctgccgtccgcatactgacccgccgtccagaacagcatgatcaatatgaagccgccgacaagacattgcgcggcgagatcacgccatctcgtaaaccgctgacgtttgctttcaagatcaaaccatgccttctctttctcttcataagaggaaataaaggccgcctggcgtcccgagaacatccagtcgctcacgccgagcacggcatctgtcagccggctgtagagcgtattccggccgcttttcagcctcatgtttttcgctctcgtcacaagaagcgacacaaccggaaacaatacaaccaatataaacagataaatcgccgcaaaagcggcaaacggccaggaaaaaaagccgagtccgataacggatgccgcatacagcagcaaagcggaaaccgcagggaaaatcgtttttaaaaacgcatcctgcaaatgctcaatatcctcagccaaaatgccgagcatgtcgcccgtccgaaaacgggatgaaagcatgagcgaggccggctccagcatattgtaaagccgcaccctcatgtcggacacgattttcaaaatgatatggtgccccgtcagacgctcggcgtaccgtgagactgaacgggcaatcccgaaggtccgcacggctacaatcggaacgtacaccagcaggatattctcaggcctagccgccgacttagagatcaaaaaaccggaagtgaacatgagaaaggccgccgaaaaaatcgtcaccgcgcctaaaaaaatcacaagaacaaacaaacgggcattttgcttcatatacggcagaatccattcttcttttctcatgttctttcccccagttgcgcctttacaagtttggcgtatacgccttgtttcgccatcaattcgtcgtgggtgccgatttccgccaccgcgccgtcatcaagcacgataatttcgtccatctcaagcatccagtgaagacggtgagtggccagaaaaacaagtttgttttcaaacaggtctttcatcgtttcttttatttcatattctgtttcaatatcaaggtgagcggtcggctcatccaaaaggagaatcggccggtttcctaagaaggctctggccagcgcgacacgctgagcctgccctccgctgagcgcccgtccgccctcgccgatccggccgtcaagaccgccgggcagatcacggatcagttcggaaagacccgccgatctagcggcctgcgccgtttcctcacgcgaagcatcaggatgataaaaccggatattattcaaaagcgtgtcatcaaaaatatacgggtgctgcggaatatagagcagctgcttctgccagccgtccgactgcagatgcgagcgggattcaccgtttaccttgatctcaccggacgcaggctctaaaaagccgcccagcacatcaatgagtgtcgattttcccgcaccgctttccccgataattccgattttcttcttccctttaaaggacagatgaaattcagacatcgattcccggacggacaaacgcgtaagctgtaattcatcccggtcagtccacgtatcaagttcgagcggcttttcttctttaaaaccgggctgcgccaaaatcgcttgaatggttttccccgcctcctgcccgtttaacgtcgcgtggtaatcatttcccacttcgcggaccgggagaaaatattcaggcgcgagaatgagcgcggtcaatgccggcccgagcagaatttgtccgtctatcagccgcaagccgagaaacaccgccactgtcgccaccgacagcatcgtaaagaaatccagggcgaatgaagataaaaacgcgacccggagcgtgctcatcgtcgccttgcggtatctctcactgacatgaaagatgttttcactgtgtgatttgcttaatcctaaaaaccgcaatgtctccagtccgcggagcgaatccacgaaatgattggaaagcgtctgataggacttccattggcgatcggcttttttctgtgcgacaagtccgagcagaatcataaatacaatcaaaatcggaagcgcaagaatcagaatcaatgccgatgttttatcctgaaaaaacacgtaaataacaacggccgccggcacaatcgccatgctgaccattttcggcagaaacagctctaaataacggcggaactggctgatgccttccatcgccagcgtcaccatccggcctgtcccctcttttttcacaaagcgggggccgagacggaacaattgctcaagaaatctttttcttaagtccgcgccggtttgcgcggcatattggtacacgattttctgccggaccgctgtcaccgcatgccggatcaaaaacgcaagcaggaaaaagccgataaccggataaagagaagcaatccgcttcccgttaaataatccggttaccgcctggctcagccattccgcctgcaagatgatggcggccgtttgtataatcgttaatcccgtaatgatcgcaagaatccgcttcattcctttataaagaaacaggtcttttcccattaataagtcataggctccttatggctgacgcgtttccggaagacataatagctccagatctgactgccgatgacaaacggcagcagagtcagtgcggcaattgtcatgaccttaagtgaataatcaccggaagacgcgttagctactgttaagtcatacgcgcttttcagcgagctgaccatgacgcgcgggaacagagagataaaaatcatcgcaactgtcaaagcaagacccgcgccggtcataccgaatgcccagccgtcttttttcttgctcatgaacacaacagcaagaacgttgcagatgacaatcagcacgaataccggaatcgtgatgtttgcccggcgtgtaaacatgtccgtatcgtatgcagacatcgcaaagaaagcaagtacaacaagaaagataacaccgattacgcgttttgccatttttctcgcacgctcttgtaaatcaccgatcgtgcgcagggtgataaacattaaaccgtgcaggaatgaaagaagggtgacggctgctccgccaaggacggaatacacgttcacaatatctgaaaaacccgcatgcatattcatatggccgtcaatcggcatgccgcggaacaagcttgtgaagataaggccgaatacaaacggcgggataaggctgccgaagaaaatcacccagtcccatgttttgacccattttaaatgattcacttttccgcggaattcaaacgccacgccgcgtcccattaaagcaagaaggatgatgataaacggaatataatatccgctcagcatcgtcgcataccagttcgggaatgccgcgaagatcgctcccgtacctgtcagcagccatacctcattcgcatcccagaacgggccgatggtgttaatcagcactctgcgttctaattcattatggccaagaaatcgggtcgaaatgccgacaccgaaatcaaaaccttctaaaaagaaaaatccgacaaacaaaactgaaacgagtataaaccaaagatcatgaagtgaccccatggtagacctcctgactgaacggatccgttgatacaggaacatccttgtgatcatcatggtccgcaccttttttaatttcacgaacgaataggaagacaagcagcgcgcctaaaatcaagtacatgacgccgaagccgataattgaaaacagcagagatcccgtcgttacgttaggcgaaacggattgtgcggtcgtcatttgccccatgaccgtccacggctggcggccgatttcagtcataatccaaccggcagagttcgcaatgaacgggaatgcgatcagcgcgatcatgccccgtaaataccacttgctcgtatgaagctttttgcggcggttcagaataaagccggcaatcgcggcaaaaatcataagcgcgcccgctcccgccataatgcggaaactccagaacgtcgttttaacaggcgggatatagtcgccttttccgtacgttttttcgtattctttttgaagtgttttcatccctttcacactgccgctgaacttctggtaagccaagtagctcagtgcgtaaggaattgaaatttctgatgtgtttttttctttattcgtatcaatattcgcaaaagccgtccacgcggcaggatcaccgctgtcatcccaaagcgcttcactggcagccattttcatcggctgcgattccattaaatgctcagcctgcatatgtccgctgaacgcaacgccgataccggcgatcagaccgacaatcatcgaaagcttgaaagatttatggaagaaaggcacttcttttttcttcaataatttaaatgcgctgacaccggcgataaagaaagcacccgtcgcaagcgccccgaaaatgacgtgaggaaattcaacccaaagctgagggtttgtcaaaagcgccccgaaatcattcatttccgcgcggccgtttttaatcgcaaagccgaccggctcctgcatgaatgagtttgccgtcaaaatccagaaagatgacataatcgttccgaaggacacaagccaaatgcaaagcaaatgcacttttttagataaacggtcccagccgaaaatccataatccgataaaaatagactccataaaaaacgccaaaagcgcttcaaccgcaagcggagctccaaatacatctccgacaaaacgggaataatcagaccagttcaatccgaactggaattcctgaagaatccctgtgacgacgccgacagcgaagttaattaaaaagagatgcccccaaaatttagccattttgagataggtctcttgttttttgacaacataaagcgtctccatcaaagcaaccataaacacaagcccgatagacaaaggcacaaacaagaagtgaaacaatgttgtagatgcaaattgaatgcgggctaataccaactcactcatgatgtttttcctccaatctggtaaattgctcaacatttcacaaacatagcaaaatcattgctcggtatttcacaaaaaatgatatatttgctcaatgtttcacaaattcgtcaaaactattgaaatatcagcctgtacaccctgggggacagcggctgtcatagaaatgattcaatatcattactttacaacgattcagcctaaaaaaaaagatcaatatacctaaaataaggctgaaattgtgaccgattattgtcggatttgtagagattttatgtcagcacctaggatatttgtccctttgatatcgtacctcttttttattcgtgtggcgaacaaaatgcttttctcggtgaaaaatcccgccaaatcgccattttgagaaagaaaatgtgaagaaagcatgtcctctagtaaattcataatatatgaacaatttaaattttttagtatactttaaatggggatattttttcactacataacgactgggggaacaagcatgggagaacttcaaccaaaattgcaaacggattcaatccaaaaacaggaacggactgataactggtttgccagagcaatgaatataagaatcggcattattcctcttcctatctatatcctgcttttcttgcttattacggtgtttgtcatgagccgtgatgtaaaaagcgacattctgacatcaattgccgtcatgagttttttcggatttaccttcggccagatcggaaaatcgattccgatcgtgcgttccatcggcggccctgcgattctcgcaacctttattccatccgctgtcgtctactaccacttgcttccgaaagacattattacttcaacaacagaattcacagaaagctccaactttctctatctatttattgccggtatcgtcgtcggcagtattctcgggatgaaaagagagacgctcgtcaaagctttcgtcaagatttttattccgctgatcgccggctcgatcgcggccgccatcgtcggcttatgcgtcgggacgctgctcgggctcggctttcagcacacactgctttatattgtcgttccgattatggcggggggtgtcggtgaaggcgcgattcctttatccatcggctactccgatattatgccgatgtcccagggagacgcctttgcgcttgtgctgccgtccatcatgctcggcagcctgtgcgccattatgttatcgggtttgctgaatgtcatcgggaaacgcaaaccggaatggacgggcaacgggaaggttgataagtctgatcattccgctcccgcattggaacagccggccaatgataaaacgtttgatttgtcctttttcgcttcgggcggtattttagcggtttccctctatttggtcggcatgctggcgcatgatttctttcagcttccggctcctgtcgtgatgctcgtctttgccgttctcattaagctgttcaggctggcgccggcttcgattgaaaacggagccttcggcgtctcgcgctttttctcgacagccgtgacctatccgctcttatttgcgatcggcgtttcaatgacaccgtgggacaagctgattgcggcgtttacgatcagcaacatcattaccattttatcaatcgtcgtcacgatgatggccgtcggttttctgaccggaaaatggctgaatttgtacccgattgagacggcaattattaatgcctgccattccggccagggcggcaccggcgacgtcgcgatcttgagcgccgctgaacggcttgagcttatgccgttcgcccaagtgtcgaccagaatcggcggagcgattaccgtgagtgtcacccttctgctgcttcatcaattctattaaactgaaaaaagcctccgcatatgcggaggctctgttatttcatcacattttgaatataagagccgaatgccgcgccggacatgcccggcgacacacggacgcggtgaagcccgtaaagcccctgatctcttgacgccgctcccggctccgtcgtaaccgccatacggtagcctgacgcggcggcggcttttaatgtttccttattatatcgtccgactgggtagctgatcatagacgtccgctgcccgaacatttgatcaaataaacgcttagagtccttcatttcacgtcgctgctgctgcggtgtgagcccgttcaattcgagatggttcatcgtatggctctgaatggaaatgccgtgggcggccatctccttcatctgcttctcagtcagatgattcttatgcccgatatagtttccgatcataaagattgtcgctttcatcttgtatttctttaaaataggataggccgctttcacattgtcggtatagccgtcatcaaatgtgatcagaacacatttttcacgcggctccttatcctccgtcagcatcagataggcctcttcaggagtcatcgtataatagccgtgatcatgaagccacttcatatgctgccggaattcttccttcggcacacgcaggctgtttccctcagaaatgctgtggtacatcagaatcggcagtcttgccgttcctttcgtttgaacccaggcggacgtatccggctcttttttgatttggcgctttacagactttttatcgtggtgcgcttctgccttcggaatgctttgttcggcgcttgcctcatggcccgagcaggcggcaagcgtaaacacggcagccaaaaggcacatgcacatgatcatgcgtttcatcgttttcctgctttctgtcttctatttactttttatatcggttatgcgtcataaattgttacatcaaaaaagccggacatccagctgtccggctttgcgttatgagcggattctgatttctgtttcactgtcaaaaaagtgagctttattcatgtcgaaagcgacggtcaattcctcaccggcacgtatgtcatggcgggcgtcaatccgggcgataaaatcctgatccccgatccgggaataaaccataatttctgacccgagcaattccgcgacattgattttagctgtgatggatgaattcttataggattctaccacaatcagctcatcatgtatgtcttccgggcggatgccgaagataacctctttgccggcataccctttttcccggagcattttcattttcccttccggcacgctgagagcggctgaaccgatctgaatggcgccgtccgtcagctttcctttgaaaaagttcatcgctggggagccgataaacccgccgacaaatacgttttcgggatgttcatacacgtctttcggcgtgccgatctgctgaatttttccgtccttcatgacgacgatgcgtgtcgccatcgtcagtgcttctgtttggtcgtgcgtcacatagattgtggttgtttgcagcctttgatgcagcttaataatttctgcccgcatctgcacccgaagctttgcgtccagatttgacagcggctcatccattaaaaacactttggcgtccctgacaatcgcccggcctaatgcaacccgctgccgctgcccgccggagagcgccttcggtttgcggtgcagatactctgtgagccccagcattttcgccgcttcctcgacccgtttttttatctcaggtttcggcatcttcctcagcttcagaccgaaagcgatattatcatagaccgtcatgtgcggatataacgcatagttttgaaacaccatggcgatatccctgtctttaggagcgatgtcattcactctcgtgtcaccgatatagaaatcgcccttcgtaatgtcttccagcccggcaaccatccgcaatgttgtcgacttgccgcaccccgacggaccgacaaacacaataaactctttatctttaatatgaaggttaaaatcatcgacagccgcttctttttgatcgtaatacttataaatatgctccagccgaagttccgccatgtcatctccccctttttgcaaacgctttctttaataagattgtaacagcgtcagacggcggcggatataggcaatgttcataaaaaaagtccgctgccttcgtgcacatttcccatttaatgtgatttttcatactgcagacaaatgaaataagccagcagggcgccccgatatgtcttaatatcaatacccgagcgttccgcaaatttatcaatccgatattgaagactgttgcggtgcaaatgcagtcttttcgatgtgagcgacatgttcgagttatgttcaataaaagtctgaatcgtatgcttcagctccggttctttctgaaacagcagcaccgcttcttcgtgaagcaaggctgagagcttttctctgctttcttccgtgagcatggccggaaataccgtttccgcggtcagcgtgctcagctgcgggagataacgccggccaatctgacaatattgctgttctctccgataatgaaggcgcagacgttctcccgcgccataataccttccgatgaaaaaacggacactgaaataaaaatcgccttcgagaatcttcacaaaagatgcgatgtcatccgaatctggcgcttccagcttttcttcctccacaatcacgccttgatcccttcccgtccggacaactgtatatgaaaccggccagaaatggcgcagcgcttccgtaaatgccccccaatcccgttctcccaataagtcataatggataaaacggacacgaggctccttgacatcaggcaccgggccttcttccagcagaaaccgccgccacctctttgctgccgccgtctccggaaaaaaatcgcctttttcttcagcgggcgtcaaaagtgattccagaagcagtttctccttcggggtgatatcctccttcggaatggcgacatagacccgccttttctcatcataaaagcaaaagacatcctccgccgtacagcacttatcagacaacacagccctcgggtaaattgccaataacgggttcatatgcgctcctctctatcgctctatcatattttcagtataaaacgtccggccgattgtatccacttcgttttaagaaacagctttcaggctatttcccgggaaacggatcataacagcttctgccggcataagaaaaaaaccctccgcgccggcagagggatcctttttatttagagatatcgacgaagccttcaccaaagacgtcacgcacatcatgaacaatgacaaacgcttttgtatcacagcttttaataatttttttgagcatggaaagctcttgtttctggatgacgatatataaaatttctttcgactgccccgtgtaatttcctttacccgacagcagcgtaacccctctgtccataagcgtgttgacctgttcggcgatttcgtgcttatgctcagatataatcgtcaccgcttttttcgtattcaggccttcaatgataaagtccatcaccttcgttccgatgtacagcatgacaatggtaaacatcattttttctgcaccgatgatgaaataagaactgaagacgacaatcagatcaaagaacaaaagcgcatagctgatattccaatcgagatatttgttcgcaatcctcgccaaaatggcagaacccgcagtcgtgcctccgactcgaataatgatcccgattccgacaccggcaaacacacccgcaaaaatagtattaataatgagttcatgtgaaggcgagtgccaatcatgcgtcagatgcagaaacagtgagttggcgacaaccgtaatgatcgtataaagcgttgtttttccgtctaagaatttatatccgataatcaataagatcccgttcaaaatgatattcgtcaccccgggcgaccattcaaacacatagtacaaaatcagggtgattcccgttaccccgccctctccaagatcattcggaatggcgaataaattaacggccaaagcaaagataaaagccccaataatcagcatcagcacatccagcaatctctttttcatcccagacactccctttatataaaatcaaaaaagcccgggagagcactcttcattaaaagagcagaaactcccgggcttttatcccaacgtgtcacagcaggaacctgctgtgtgttttctctcggtccagaccaattcagcattgcggaaccctagaaaaccactgttttttatgttcagtttttgtatatctttcaagattatacgggaaatcacgaacatgttcaaccactcttttttccataaacgtataaaaaattcgaacgaactgccgatactaaaaaaggtccttaaaatacatgactaaaaaatcattaaaatactttttttctcaaaatattattgactataggttattttacaggcattatagtatgtagttttcaagaaatagtttacataggaggaaatattatggcaggcaacctggtgtcttgtaaggcatgcggcaaagaaatcgctaaaggcgttaaaaaatgcccaaactgcggtaaagatcagagaaacttttttatgagacataaaattatcacattgcttctggcagtagtggttattatcattctcgtaaacatcggcggcggaggcggatcttcatcatctaaaaccgcgtcttcaaaagctgcggaatccaaggaaaaactgtataacatcggtgacactgttaagactgagaaaactgaagttactgttacgaaagtcgaaaaaagagattcagtaggctctcaatttgtcgagaaaaaagcatctgacggcggcgttatcgtagctgttcaatacacagttaaaaatgtttcaaacaagccgttaagctctttctccattccaagagcgaaattagtagattctaaaggaacatcctatgattcagatattgatgcttcttcaagctatgcaacagaaacaaaagtagacaacagtaaaattttaagtgacttgaacccgaacattaaagttactgacgtaaaagcttttgaagttgataaaaacgcatactctaaaggcacttggaaattaaagttcagcaacgatgttgaagtgaaaattaaataatgaccgtaataaaagagaccttcaccatttgaaggtctctttctttttacaccttttggtacccgttcacattggaggactgccacttccaagagtcggcgcacatttcttcaagtccgcgctttgcttcccagcctaattcagcctttgcttttgccgggtctgcgaagcatgcggcgatgtctcccgggcgccgggcggcaaaacggtacggcacttcttttcccgatactttttcaaacgccttgaccatctcaagaacgctgtagcctcttcccgtgccgagattataggcgtcggcgcccgttgtgttcagcaccttctcaagcgctctgacgtggccctcggcaaggtcaacgacatggatgtaatcccgcacgccggtgccgtcctttgtcggataatcattgccgaacacctgcaattgctcaagcttgccgacagcgacttgtgcgacgtacggcattaaattattcgggatgccgttcgggtcttctccgatccgcccgctcgggtgcgcgccgaacggattaaagtagcggagcagcgcaatgctccattcagaatccgctttatgcagatcgcgtaaaatctgttccagcatcagctttgtctgcccgtaaggattggtcgcgcttaatggaaaatcctcagtgatcggcgttgtttccggaacgccgtaaaccgtcgctgaagaactgaagacgatttttttcacaccgtgtgcctgcatggcttcacataaaataaacgtccccgtcagattattatgataataacggagcggaacagccacagactcaccgacggcttttaatcccgcaaaatgaatgacggcttcaatctcattttcagcaaacacccggtgaacggcgtcacggtcaaggagatccgcttcataaaatacaagcccttttccggtaatgtctttcacacgctccaatgcttccggtgaactatttgacagattatccaaaaccacgatgtcatagccgccgtttaacagctcgacacatgtgtggcttccgatataacccgctccgcctgtcactaaaatcgccatgaagaaagcctcccctattgaatgaattgaccatattatatcggttttttcttcctcaatcatccatttccaaaaagtttaatcgtttagtcatcgtttcttcataatttgttttcattcgcgtaatacacagagccctcgattcaaacgggttgtgaaatagaaatccctcccccgcgcatggtaagataagacaaaggagatgacggtatgaaaaatgaaatcattgaacgctttacctcttatgtaaaagtcgatacacagtctgacgaaaacaatgaaaactgcccttcaacccccggccagctgacattggccaacatgctggcagatgaattaaagtcgatcggcatgacagacatcacagtcgatgacaatgggtacgtcatggcgactctgccggcaaatacggataaagacgtgccgactgtcggttttctggctcacgtggacaccgcgaccgattttaccgggaaaaatgtgaatcctcagattattgagagctacgacggacatgatatcgttctgaatgacaaactcaatgtcgtcctgtcgcctgagcaattcccggagctctcccgctataaaggccagacgctgatcacaacagacggcacgacgctgctcggagccgacaacaaagcgggcattgccgaaatcatgacggcaatggcgtacttgatcaaacatccggacatcaaacacggaacgatccgggtcgcgtttacgcccgatgaagaaatcggcagaggccctcacaaattcgatgtcggccgcttcaacgccgcattcgcctacacgatagacggaggccccctcggcgaactgcaatatgaaagctttaacgcagccgccgcaaagcttacttgttacggaaaaagcgtccacccgggaacggcgaaaaacaaaatggtcaacgcttcaaaaatcgcgatggaatttcatcacgcgctgccgaaagaagaagcgccggaatatacggaagggtataaaggcttctatcatttactttccatgaacggagacgtttctgaagccgccctgtcgtacatcatcagagactttgacagagaccgctttgcagaacgaaaagaatatatgcagaaaaccgccgatgcgctggcggccaaatacggcaacgaaagcatcaagcttgaactgcgtgatcaatattacaacatgagagaaaaaatcgaaccggtcaaagagatagtcgatgtcgcctatcaagccatgaaaaacctcgatatcgaaccgattatcgaaccgatccggggcggaaccgacggatcacagctctcttacatggggctgccgacaccgaacatttttacgggcggccaaaacttccacggaaaatatgaatacatttccgtcgatcatatggaaaaggcggtaaacgtcattgttgaaatcgccaggctctttgaagagcgcgcttaaaaccaaagccccctgctttggtttttttctttcacatgaaacctttccttctttctttccgtatataaggtatgaattggaaagaaggagtgaagactatggcaagagggactgtagcgaaagaattgaaaaaaaccttaaaagacccgcgtattctggagacgaaatcaaacccttttaaaaaactgcggaaaatgttcaaacgatttttttaagataacatctcgttttctttaaaaaaataaagaaagcgctgtcatcctgcagtcatctgttagaagcagttattttgcatatgataaggttttttagggtactgaataacacaaggcaaacgaaaacactgaagtagttaattagacacttacaaaaaatagtgaaaaagttatataaacgatcgtcattcatcagccgatacaatctatagaaccacaacaagagcaaaatctcttcaacccatagtcatttttacggaaaatgacgttattttttaaaaaagtgacaattgtttgaatacttttcgtttgttttttcgtacaataataataccaaaactttttttgggaggtatgtaaaatgatgctacttatttttgctgctttgacagggtatcttgttttctctttcagtaaggacaaccgccggaaaacgccaaagacaagcccgctggtgacagctgccgacacgaataacatcattgatttaaatgcgatccgtcaaaaacgccggatgccgctatcataaaaacgacagctgccgcaaaatcggcagccttttttttatgcacccggccgatatgaaaccaaccgcctccttttttcgtacaacataaaaaaggagtttttttatgtaccatttttacatcaaagagcgaatgtttacgtttaagaatcgttttcaagtgtttcttgaaagcggaaaagaagtctacaatgttgaaggaaagctgttttcattcggtgatgaactgaaactgactgatttggacggccgaacgctcgccagcgtcaaccagaaactgatgtcgctcgttccccgttacgagatttccgtcagcggcaaacccgtctgccaagtcatcaagaaagtcacgtttttcaaaccgaaatttgaaatttccggactcggctgggatcttaccggcgatgtgtggggccggaattttcaagtgacagacggaaaatcaaaccggatgaccgtcaccaaatcatggatgagctggggcgattcctatcatttgcagattgaaaaggaagaggatatcgttctttgtctcgcgatcgccattgtgatagatatgattctatttgagggtgataaataaaaatatttatcgaaatatattgacaatataagataatatactaagattaagagtattacagtttattctgaaaaatagcatatttccttatcaagagaggtggagggactggccctatgatacccggcaaccgctgttcagcagaacggtgctaaatcctgaagataaggttgagatttgcggacgcaagctcttccctatccgagggaagagtttttttatatttcatcaggaaagaaggaatcgttcatgtcacagcaaaacacagaacaaccattgcatacgcttctaagaaaaaacccgccgtttcgcgcggatcaggtcggaagtctgctgcggccggcggctgtgaagcaagcccgcctgcaaagagcggcgggtgagatttcggcagaacagctgcgcgaaatcgaaaacaaagaaatcatccgcagtgtgaaaaagcagaaagaaaccggcctcaatgtcgtgactgacggcgaattccgccgggcctggtggcattttgattttctcgaaaatttagacggcgtcgaagcgtttacgcctgaaagcggcattcaatttcacaacgtacagacgaaagcgcgcggcattaaagtaacgggagatattgatttttctcagcatccgatgctcgaagattataaattcctgcacagcattgccggcgatgctgttccgaaaatgaccatcccaagtccgaatatgctgtttttccgcggaaaattggaaaaagcggcctaccagaatgattacaaacaatttcagcacgatgtgtcaaaagcgtataaaaaagcgattcaagctttctatgacgccgggtgccgctaccttcagctcgatgacaccgcatgggccgttttcttatcagaagctgggcttcgtcagattgaagctttcggcacgacgccggatgagctgcgcaagctgtttgccgcttccattaatgacgccatcaaggatcgccctgacgatctgaaggttacgatgcatatctgccgcggcaacttccaatccacttggacggctgaaggcggctatgatgcagcggctgaaacgatttttgacgggcttgatcttgacggattgtttctggaatatgatgattcccgctccggcggctttgaaccgctccgttatgtcaaacgctctgatcttcagcttgtgcttggcttgattacgtcgaaacatggcgaacttgaagacaaggacgcgattaaacgccgcattgaagaggcttcacaatatgtcagcctggatcagctttgcctcagcccgcaatgcggattcgcctccactgaggaaggaaacctgatcacagaagaacagcaatgggcgaaactgcgccatgtcgtcaacattgccggtgaagtctggaaataaaaaaaaagacacgcgattagcgtgtcttttccgttttacagcggatcggttccgattaaaatatcgatatctatcgtgacatcagcctctttccggctgataaaccgccggatgctgtcatcagtacatttccatgttaagggcgtcattttcacaagccgctcgaggtcaagctgcgctaaagtctttgtgtaacacagccgtttgcgctcaaaggtttgaaagcccgcttggaatcgtccggccgcagaatcggcggtgtcattccgccgagggctgtctccgaagaagaattcccttacttccttcaaataatcacgccgcggcaccgctttaatgactgtgccgccctttcgtaaaagcctgctgcattccttgtaattccaaggtgataaaacagacatcacgacatcaaaacagctgtcggcaaacggcgcatccgccacatcagcgacggcaaaaaccatatgattcccgaaggcctttgcggcatgcagcacaccttctttcgagagatcaatgccgattcccgtcacggaaaaagcaggctgaagccatttgcatacggcggctaaatgagacccttctccgcaccccgcatccaatatcgccgctgatgtttgcggagattgaatatgggtgatgatggcggcaatctccttttgaaccggcgcaaaaaattcccggctgtcaaaaagctcgcgtctcgcttcgaacagctgcctgtcatagcgggttttgaccgatttattgaggaaattcacatatccttgttttgatatatcaaatgtatgcccctgtccgcaaatcaagcttcggtattgtgagaccgccatggccgaccggcatagcggacacctgaacacggactggcatgattgcagtaattccgcgcgttttctttttatagacgtcaaaaaaacacctcattcattcgttattccgatgaaatgaaaaaggcatagacaaataaaccttgctgaattggaaggtttaacctatttgtctatacctctcattatctgtaacgaatgaactggatgatcacgaaaatgaccccttttctgccgtcttttgaaggctgtgccctcagatccattttatcagctgcatcccgtctttacaatgaatcggaacggttttcaggggttttttatacctttattatccaattacttatgcacatcctttattttctttatttataatataaatttattattttgaaaatatctaaaaaggttgattttcaaaaattgaaacgataaaatactgctatctcatgtaatatcgttattcttgtatatgatcagtaatatggtctgattgtttctacctagtgccgtaaaagactagactacaagaaagtttgcataaatttgaacgagtgaaaagcatatgatgctgtcagtctattcttttcttttggctcttatttatcacactttctggctttcaggaatttgtgacgaataggagctttttttatttccataatacccttataggagttgctcacatgtactttttattgaacattgtcggtctcattgttgtcatggctgttgttttcttatgctctcccaacaagaagaagattaaatggcgtccgattgtcatgctcctcgtctttgagtttctgattacttggtttatgttagggacaaaagtcggcggctttgtcatcgggaagatcggcgcgttctttacatggctgatttcctgcgccagtcaagggattgcgttcgcttttccgtctgtcatggcgaacccgacggttgattttttcttcagcgcattgctgccgattatcttcgtcgtgaccttctttgatatgctgtcgtatttcggtattctgccgtggctcattgataaaatcggctggctgatttctaaaatatcccgtctgccgaagctggagagctttttctccatccagatgatgtttttaggaaatacggaagctttagccgtcatccgccagcagcttgccgccgtcagcaacaatcggcttttgacattcgggctgatgagcatgagcagcatcagcggctcgatcatcggatcgtacttgacgatggttccgtccacttatgtgtttacagccatcccgctgaattgcttaaacgcgcttttaatcgccaatatgctgaaccccgtggacgtttctaaagaggatgatattatttacgttccttcaaaagcggagaaaaaagacttcttctccacgatttctaacagtatgcttgtcggcatgaacatggtcattgtcattttagcgatggtgatcggctatgtggcgttaacggccgcgttaaacggcgtactcggactgttcatgcacgggttgaccattcaaaagattttctcatacatcttcagtccgtttgccttccttctcggattaggcgtacatgacgcgatgtatgtcgcacagctgatgggcatcaagctcgcgacgaatgaatttgtggcaatggccgatctgaaagggcagctgaattcacttccgccgcacacgattgccgtggctacgacattcctgacatcattcgcaaacttcagcaccatcggtatgatctacggatcttatcaatctctgcttgatggtgaaaaatcagccatcatcggaaaaaacgtctggaagctgcttgtcagcggaattgccgtttccttattgagcgcggcgattgtcggattgtttgtctggtaaaagaaaaaaagcgataccgctccattttggagtgatatcgcttttttttattgatagacggatgcaggtacgaaaacgtcccggattcctgccgcgtaaggtccgagatcatattgtccgaacacaacggcaatgccgtttttcgtaaagaagaaaggtctttcgctattcaggatgatctcttgttttttgacgtcctggtcaaacagatcgtcatgtttcttgatgtagccgtaaagatagtctctcgttttgttagctttcgtttttgtattcagcacattatcgagtgtgacccgttttttcgcggccaggtcgtaattaaaggtctgaacggatgtcagcccgtgtgcgccgcctgtgtaactgtagtcttccgtctgaatgctgagcttgccgtcttgattatacttcaccttaaaatctgtttggtattccgctttgtagccttgtttttcaccgtcttttttgtttttcacatattctttgtacgattgttcaatatagcgcttgaagtcctgattgactttcttttcaaaagatgcgtttcccgtatttgtgacctcggggtatgtcagctgctttacatgcttatacgtatggcttttgacaacaggctttgcggtttgcgcggcctcggctgaaggcgcgaaacctccgaacggcgcggctgtcagcacggttaagagcacggccgccatcattttgaatgcctttttcatcacaactcctccttttcattaccgttccctttttgaaaacgggttacactctatagacagcgcggatcagcaaattgtttctgggccttctttcacattttctccatgaaaaaaagagacatggaaaatccatgcctcttttaccgtgaaggtctttgcgcaatggcttcataaacggcttccgccaaatcggagttgccgaacatctccaaaacgccgatgacggtttgatcaggaatcggttctgattcctccttcggcacgacaagctcttcagccgttttttgcagctcttcgtttaaaggctgtccgggataagccttgctgtaaatggccatcggatcaaggtcatgattgacgcaccattgggcaaacaccaaaatcatcatgttttcgtcacgccggtaatattcttcaagttgtttttcggtaaacggcttcactatcattcgctcctccagaaaatctacccctaagatacacaaacacagagcggaagtaaaccaaagattatttcaccatcagtcagaaccctttaaataatgcaatgccctgactctctaaaactgttgtctgaatgtcccggacggatttgcacggaagccattttcgttttctttcacaagaaaaaagcgcccctctcataaaaggcgctttttattcttatatgtttctgtcccaatgccgatgctcagccacggccttcagaaattgttcatggttcccgtccggaacaaggccggggccgttttcggttccggcggcgagggcgagaagttcttttccttcaccggaggcgccgatcgctttgtaatggctgaaggcttcgctgacgaagtctctggccgatttttgggctttgaggctgtctgtgctttgtttaccgcccggaatgaaaacagcgtcgtacaggacggaatccgctgtcaggaaagtggctgacgctttcagctccgtaccgttttctcccttgacggttcccagcgcggggctgatgatatcggctctgactcccgcctgtttgcatgcgtcaagcacttgtttgactttctcatcagaaaacccgtggtcggttaaaaccgcgacctgccttgtcgctgccgtcttcaccgtgttttcctggcttaaggccggggaagtgaacgtttcatcagattcacggtccttcggcggcgggttcacgccgattcctttcgcaacacgctcggcaagcccggcgtcgacgtgactgaagacatcaaccacctgttgctgcacatccttgctgttcacttttccgacttcaaaacagaacgcggagatgatatgttctttctcggcgggagacatgctgttccaaaacatcttcgcctgagaaaaatagtcattgaagctctcactgcgctggcggatttttctgccttctactttttcctggtaatgaacgtatccgccttcttcttctgaagccggcgacggatcattgttctgcagggattttttatgataggcgacgggacccttattaatcgtcatccggtggtagccgtcgtattggttgttatggaacggacagaccggccggttgatcggaatctcgtgaaaattcggcccgccaagacggatgagctgtgtatctgtataagagaaaagccggccctgaagaagcggatcattggtgaaatcaatgcccggcacgacatttcccgggtgaaaggcgacctgttccgtttccgcaaagacattgtcctgattgcggtcaagggtcatttttccgatcagcttgacgggaaccaactcctccggccacagcttcgtcggatcaaggatatcgaaatcaaatttaaattcatcttcttcgtcaatcatctgaacaccgagctcatactcgactttgccgccgttttcaatcgtttcccacaggtcgcggcggttgaaatcgggatctttcccggcaattttctgcgcttcatcccatacgagggaatgaacgccgagcacgggtttccagtggaattttacaaagcgcgcttttcctttctcgttgacgaaacggaacgtatgcacgccgaagccctccatcatccgatagctccgcgggatgccgcggtcagacatcgtccacatgaccatgtgagccgactcagggttattagcgacaaaatcccagaacgtatcatgagccgtcgcagcctgcggcatttcattgtgcggttccggttttatggcgtgaacgagatccgggaatttgatcgcgtcctgaatgaagaacaccggaatattgtttccgacgaggtcatagttcccttcttcagtataaaacttcgtcgcaaatcccctggcgtcacggacggtgtcggctgaccccttggaacccgccactgttgagaaacggacgaaaacaggcgttttgacggacgggtcctgcaaaaatttcgcccgtgtatattccgtcatcggttcgtacacctgaaaatgcccatgaacaccgtacccgcgcgcatgaacgacccgttccggaatccgctcgtggtcaaagtgcgtcattttttcacgaaaatgaaaatcctccatcagcgtggggccgcggccgcccgcttttaaagaatgttcatcctcagacacgcgaagcccctgattggtcgtcatttttttgccgctgttatcagaccggtactgctccagctgttcgtcctttgagtgttcatttactcgtttgttttgatcatcactcatgtcagttcccccttttaaaacgaaacattctacagcacatttacccgcggcgttcttcatataaactgctgatccgctcattaggattttaggtctgtatttacatatgcggtcatacacattttgaaataagccattttcacagaaataaattgtgaaaacgcttaccgaaatagctgttgaacaggggaggtcatatcgtgcttgccatactcggttttgtgatgatgattgtctttatgtatcttattatgtctaatcggctttccgctcttattgctttgattgtcgttcctgttgtgtttgccctgatcagcggatttggcaaagatctcggcgagatgatgattcaaggcgttacagacctcgctcctaccgggatcatgctgttattcgccatcctgtatttcggcattatgattgactcaggtctgtttgatcccctcattgccaaaattctatcgcttgtcaaaggggatccgttaaaaatcgccatcggcacagcggttctgacgatgaccatttcgctggacggagatgggacaacaacgtatatgattacgattgcggcaatgctgcccctttacaaacggctcggcatgaaccgtttggtgctggcgggaatcgcgatgctcggttcgggcgtcatgaatattattccgtggggcgggccgacggcgagggttttggcttccttgaaattggacacgtcggaggtcttcacaccgctgattcctgctatgattgccggcgttctctgggtgatcgccgttgcttatctcctcggaaaaaaagaacggaagcggctcggtgtcatttcaattgaacacgcgccgtcttctgatccggaggcggcgccgctgaagcgtcccgctctccaatggttcaacctgctgctcactgtcgccctgatggccgcgctgatcaccagcctgcttcccatccctgttctttttatgatcgcgttcgccatcgccttgatgatcaactatccaaatgtcaaagagcagcagaaacggatttcagcgcatgcgggtaatgcgttaaacgttgtctcaatggtgtttgcggcaggcatattcacaggcattctctccggcacaagaatggtggatgcgatggcgcattctctcgtttccctcatccctgatgccatgggcccgcatctgccgttgatcactgcgattgccagcatgcctttcacctttttcatgtcaaatgacgccttttacttcggtgtgcttcccatcatcgccgaagccgcttccgcttacggaatagacgccgctgaaatcggaagagcctccttgctgggccagccggtgcatctgctcagcccgcttgtgccatccacctatctattggtcggaatggcgggcgtcagctttggcgatcatcaaaaattcactattaaatgggccgtggggacaacgattgtgatgacgattgcggcgcttttgattgggattatttcgttttaattaaaaaaggatttccgccagcggaaatccttttctgtacattatttttttgtatagcgcacccagtcataatgagcgtatagcggatttacaccattgtaggaaccgagccagtcatcgacacctatcccattccacaagttcatcatgatctttcccgggtttgtcgggatttggcttgtcgcagtatgttttaattgcccatcgacataccatttaatagagtttggctgccaatcgaacgcatacgtatgataggcattggccgcgtcaaatccgagatccgcaaccttctcatggtttcccgcgccatttgtataatagttaaattgaacctttgtcgtgtcttttcctaaaaattcgatatcaatctcatcccaaggagtgccatccgttggacctgtataagtgaagaacgatgaaacgatccctgtgtttttagccggtttcattctgacttcataaagtccgtagccataggtttgaacggagcggttctccccgcagtcaaacttgttataagacgggcttgtcagcgccaaacgcatttcacctgatgacgtcattgatacattatttgcacgccacgtgcagttgaacatatctccattggaataaccatttgctttttgccataatccggagttatagctgttaaaaggttcaaaaaacgatccgcctgtttgagctgatgcagtagaagtgatcgcacacaaactcaaaaacaatccagtgacaagaagcagcagcactcgtttcatacgataaaacatgtcggcattcccctttctttgaaaacgatttctttatcgatcatacatgattctgttaaaaggggacatcggtcagaataatgataataatgaatcttaaaaaaacctaaattaccatcagcacaaacagaaatgatcagcgctcattgtaatttaggttttgcctgcttatcagtaacaatcctaacaagatcatatgtgaatgtaaaaaagtgaatacaagaaaacaaaaatgccaacgctttcattatgcttatttgactaccctttctatgtgaatcgttaaatacagcagctcgtcactggtgagcttgtgcttatacgccctctcaatgcatgtttggattttcttcgtgcattcatacgcccgatggtacttttctttcactgtctccagcaaaaaatcgtcctggctttccatatgtgtgccgttaaaaagacgctgcgcgaaaaactttaagtgggtgacaaaccgataatagtgaagtgattcctcgttgaagtcaatcttaaaatggtattttacgattctcaaaatctcttgcatgacttttgtaatgttgatgatattgggcatctcttcattcagctcggcattgacaatatgcagcgcaataaagcctgcttcatcctccggcagagacacgccagtcttgttttttaccatggccaacgcttgtttgccgattgcaaattcgtctttgtacagccgtttcgtttcccacagtaaggcatttttgatatccagcccttttttattgcgctggatcgcaaagttaatatggtcggtcagcgacacatagatgctgtcattgagctttttgccgagctgtaatttcgcatagctgataatctcttcggatacttccatacattcgatcgggatatcatacaaaagggttttgaacttttcggatacatctttgttatcgagcgtgaacactttctcaatgcgggcttcatctaccgggtctcccgttttcttttgaaaagcaatgccccggcccatgataaccaattcctgattgccttctttgagcacactgacaacattattattaatgactttcgcaatcttcaattctgtctccctcccgcctgaccatttacctgctacaccttgattttacatcctttttgaactaggtcaatatctccaggtcaatcagaaaacgccgttcagaaatcattgtccaacgatgaggcagcggcgcatataatgcagagaaccggtttttgggaaggagcgtgtgtgatgaaacggttttcgaaagaagaaagcagctggatgctgtatgattgggccaattcagcttattcggtcattattatgacggcggtattccccttgttttttaaagccgcggcggcggaaaacggtgtcagcgcggcggattctaccgcttatttgggctatacgattgccgccgcgacttttattttggcgatgctcggccccgtcttaggaacgattgccgactacaaaggatgcaagaaacggttttttgccttcttttttctgatcggtgtggcgggcaccgccgcgctggctttgattcccggcgaatcttggatgctgttattaatttgttatacgatttccacgatcggctttgccgggtctaatgtgttttatgatgcgtttctcgttgatgtggccgcaaaggagcggatgaatatggtgtccgccagaggatttgggctgggctatatcggcagtacgatcccttttctcctcagcattgccgtgattctttcagcacaagcggaggtgattccgctgtccgcccaggctgccggccgcattgcctttttgattacggcggcatggtgggggctgttttcgatcccgctccttctccgcgtccgccagcgctattatatcgagagggagccgcggcttgtaatcagcagttttaaacggttggccggcacgctgaagcagatcaggaagcaccgggcggtgtttttgtttctgctcgcctatttcttctatatcgacggggtcggcaccatcattacaatgtccacgtcatacggggctgacctcggcatcagcgcggcaaatctgctgattgttttatttgtcactcaggtcgtcgccgcgcctttttcgattttgtatgggcggctggccgaacggtttaagggaaaaacgatgctttatgccggaatcggcgtgtatatgattgtctgcacgtatgcttattttatggattccgcttttgacttctggattttggctatgcttgtcgccacttcccaaggaggtattcaggcgctgagccgctcttactttgcaaagcttgtccccaaacagaacgccaatgagtttttcggcttttataatatcttcggcaagttcgcttcgattatcggcccgcttttgattgccgtcaccgcccagctgaccggaaattcgtcagccgccgtgttcagcctgatcattttgtttgtaatcgggattggcatccttgcgtttgtgcccgaggagacggcgtaaaaaaagcctgcgcgcggcaggctttcttttttatttcttagctttatggactttcagttttttgcctttgaccgtcgtatttttcatgatgtcaagaacgtgcgggcctttgccgttcagaatctcgacgtacgatgcgttgtccagaatcgtgataatcccgatatcatcggctgaaacgccgtcgattttcgcaatcgttccgacaaaatcgaccgctctgagttttttctttttcccgccgttaaagtacagcttcatgatgtctttgtttaactgttcgcttttgtctgttttgacatcggggcgggcgttcagtttttccgcaaaagccgctttccgttccgctgtttctttctcagacggcgcctcccgcttttggatgcggaaaccgatatatgtctcaatgtcattcaggaaccgcgattcagacggcgtcacaaacgtaacggcccgtccgcggtgtccggcgcgccccgttctgccggtgcggtgcacatagctttctttttcaagcggaatatcataattgatgacgaggctgatgttttcaatatcaattcctctggcggcaacgtcggtcgcaatgagatagcggaactcgccgcgtttgaattcattcatgacgtcaaagcggtcttcctgcaccatgccgccgtgaattttatcgcaagggtagcccagcctgtccagctcatcggttaactggatgactctttcttttgtccggcagaatataatgcagctgtccgggttttcggtgatcaggacatcacgcagcaaagatgttttgtcctcttcttctgttctggtgacaaaatgctcaatgtcttttgtcgtcaggccttccgcttttacttcaatcaattcagggtctttcatatatgtgcggctcagcttctcgacgtcatccggcagcgtcgctgaaaacagcatggtgactctgtttttcggcagatgctgaatgatggcttccacctgttcaataaatcccatattcagcatttcatccgcttcgtcaatcactacatacgccagccgttcaagcggcagcgtccctttttctatatgatcaagcacacgccccggcgttccggcaacgacgtggcttttttgcttcagttcggttttctgtttgtcaaaagaagcttttccgaaaaccgccgtggcttttatccgtttgaaacggccgatattcgtgatatcttctttaatctgcgccgcaagctcgcgggtcggcgttaaaatcagcgcctgcggtttgttttcctcccattccgcaagctcgcagatcggaatgccgaaagctgcggttttgccgctgcccgtctgcgatttgacaacgaggtcttttttttgcagcgcggcggggatgacgcgccgctgcacttcagtcggctcggtgtattgcaagccattcagcgcccgtcggatttcggggctgatcgcatattcattaaactcattcatgactaaactccttctctgtccggctcccctcattatacgcgaaatgccgccgctttaccctgacgttttgccgggccattcgtgggactgctttttcttcatgtcaagcacgacccatttggcgcaataaaagctcatgcttccttccccgtcatcgacatagtagcggatcgattcccagccgccgtcgaccgggctgatatccagatggatgtcggtgatgctttcaagatcatccagccgggcagccctcacaccctcaaaacgcagcacggcatcatactgcccatcagtcagattcagctcaaacaccgggattttatcataatactcgttatacccggtatagaacgtaaactccgtcaattcaaaacaacccggcgaatccggccccaacagaactgctttctcatgtttgtgccactccattttgtgcctcctttttttcagctgaattggcatgtctgactcaaatgaatttttcttacaaacccccatgaatttctttatatgactgcacccaatcttttaattcttcaatcgtatgcagatacgaatcaggcgaatctttcagatcaaacccgctcaaatacacgagcatgtaccaaacggtttcgtcctcaaccgccggatcatctgcagtcacgtactcacacgcccaatccgacacttcttccctcgccgcttgaccgttcaggatcagaccagcctttttcagacattctgctcttgtgggttctttcacgtcaaaatcctgcctttcatttcttgtttaaaatgctgaccaacagccctctcacccgttcatgccgcccgatttcccggctgagctccggataatccgttaaagcgtatttcagctgcgcatattgcggataaagctcaaaaaaggatttatataaggctttacgctggcgcttaggcatttgtttattcgccaacacaaaatctaagctgccgcagataagcgcgaaatactcataaaaatcccccgcgcaggcagccccctcaaagtcttcttcgaatctccctgtatctgaaggcagcggatcctctaattcttttttgtataatttcaggtttcggatgacgtcatcatttaaagaatatctgttggatcttaacatctcagaatcaatcggatagcgcctgattcgtcgatgatcgtaaacgaaagcccgtcattctgatgccgtccgagatacagatgcccgcagttatcaaaatgacaaaaacatccttttactgattcttcgactatcttattcatttttattttcatgtaattgccccttgtatttataatgcgccgcgagctttttttgaaattcatccgaaacaatctgatccgggaatacaacagatacccagtctaaaacacggtcgtctaagggcctccatgatcctaacgtttttcccgcaatctcctgatcaatacctagaatacagatttcaaaatctctctctccgtaaatcgcccactttaaagtcggtgaagcccatacgacgcgggatgcaatattcattatgctgtcatttttactgtgctttggataatcagttaagattgaaagatattcatcttcggttatatttaaaggaatctttaaccagttaaaatatccgaattcctcgtaaaaccgattcatatcatccggttgtgtcagaacagccattaagataaattcatcgtgatgatgatgcgccaaacttttgagcatttcccagccttcttcagacaagacccagtggaattcttcaaatagataataatgttttcgttgtttaaaaacttgttcgggcaacgctttgtcttcatgaaataaggaatatattcgaaattgaaagactgccgattcctttgtgttctttataaaaaagggatgcatcttgtacctcttttcggcggtttacacacaagctcacagccgtattctgtgtgaaataaacagacagaaaatgagaaggacggctccactaaaataaagctgttagaaagcagccggccttcaaaatctataaaatccatgagacagtgcagatgacttgcacaatccttcagcgcacatttgatagcaccgacttcattactatacggatgaaacagataaacaatatcattcatccgttcaacccccgtatccgcaatgttttctaaaataagcgatatggctgtctccttgtcgcttatatcaacttcacgcactgcacttgggaaagaattcgataatatagtctcaaatatctgcctgctttgttctgcctcagctaattgataaacaaaccctgattcttcacaagatcttagcgagtcacgcacctgtttcattaaaaaatgcctcttgttttcctcaagcttgtcaattaacttttctctcatcactgaacacttccttacaggatattttcattctgccggcatgtatgctgcatagaagtaatcaatacttcaccagatataaatcgttatcatgaaagataaacatgcggtcctgtacggctctgtacgttgtttctccttttctatcaataccgtgtatcatgacgtcagtctctgataagcctttgttctcttcatgaaatgcaaatagggtatcctcgtgactctgaatcagcagcaccctttttttcgaaacggatagctgatcacaataggagtattgatcgccgtccagcacatattctgcaacagtacgaattctgtcccgtccaatctgataatgcccgatgatacagcaatcctctccctcgaaacatacatacaaatcagatttgatcgattgtacggcatagcactcatgcatcatttctttaaaatcgtctttaaaataaaacgttctgtcttctgcatgaaaagcaaatatcgctttcccttgagggtttctctcatcatacataccctcgtccgttaatccgatccatagtaatccatcctcacccagatgaaatacattggcgcttaatagaaaagaacaaatcggattgattttattactgtttacgcagcatacggctaattgacacgtatgattttcaggtaaacgatcacgatagtgtcatcatacgaatcaaccagatagaaatgggcatcttcagaaaatccgtgtaactcttttttgattaaaagagagctgcctttcataacctccaatattactttgtgatcatgcaccgacacaataaacacttgatcatcccgacccgcattgaaatagatgatgtgctctcttttatatgacccaacccgctccgcggtaagttctaacatcagcaacactccgttgattaggaatctggaatttatattaaattaatcaatgatatataaatctgctgcatcgtattcaaaccaaatgattttttcattattttcagtagttacatcaaccttttgagtgttcaggttcatataggacttatttttggcagggtttgctattataactacaaagtcattgatcgatgctaaaaaatataattcatctaataagtgatctgccatcaattgttctttggttagggcacattcaatatgaatgaactttttcgaaacagtattcatatgtatcattttcttttcaaccttcttcttccattcttcaataaaagaagggaatgccattacttctattagagctgtttcgaactctaagtcattcattaattgagaaaaagtatctttactcactagatcacatgaataaatcgaattgtatttaagcggattaatcacattcagattccctatagccctcaatgattctttttgtaaatttaaaggagtgttcatgtttacctccgtaaacggtttcgttatgtaagaaaagagaggctgggaacctctcttatttgtttatttatgatttcggatgatacgcataaaatgattggtcgtcaaagcgaactgtttcagcttctacagcaatcagcatgctgttcatatttataagaaaattagcatttgattgatactccggaattacagcatttgatagattaccgattccttccgggtggtaactcatctcaaatacttgccaattgtattcttccggatctattttttctaatctcatatcaccaatatctgcactaaaataaacagatgctgcattttgaaaaagaatgttatgcgtacattcggctttattttcaacgacctgaatcttaagtgaaagctcttttttaaacacatgaaagtcaaaatgaaggacagcgcaccctccgtctatataatctacccattcattaattgtcttgtacaccgtttatctccctaataaagttttggagtctttgagatctgattttaaagtcttcacgaaaatttctagcttttcttcattacagttcaatttatagaaggttgtatttgaatgattctccataaatctaatgataaatctgtaatgttcgttttctttatcaatacttaggataaaaaatggttcaattgtttctaaacgtatcctgtcttgattgcctgctgataatgcttcaatatctgatatcagcattttatattcactttctaataaaacggcagagtaatcgcgggcgattgctttattatgttccaacagttcaaacgttgttgagataaatggatcatccttcgcctcatgataccttctcggtgttatttcaagttccagacaaccgtctccgattttggccatgctgtctcctcgttctctacttaatagctttaatttagtagtaaatgatttgaatgacgctctggaattcaagctaagtttaaatcgattgtcaccttttactgtctcagttctaatcacctacccacttattatctataattttttttaaaaagcctgttaaccaaaagatgatcaacaggctcatctattttttatttaatgccattatttaataatgtttataatattttccttatgtctagatcctattctgattgtctcggaatctgttatttctatatgataaagaacataatccagtaaatctttaataattgttttctctgctaaaggggctccatttaatatatcttttaactcaacatctttttccaataagattatattttcatgcgcaattattgtatttttgtactcttctgctgaggtttttataaatgagatttttttattaaacaaagtatttgtttttaagctcgctgagaatatacaagtatcactatctttatttgaaacagagtaagaatacattgcgtattgtttattttccatattttttaatataacaaatattaaatcctctattgttttatactctttttcaaccgaatcatagtcattgagagttgatatttcataaaaatagtacatttaattctctccttctatcttttatacactgtaaatcgtatgagatagaataagttccttcgtcgtattggtagcctgttagcggtagcgcttgtcttttacttcgtctcagcgatatgttattcccacgtgttccgtgtgtagtttggtttttatcatataagataagagaggttggtaacctctctaaatctcttctctaaaaataactaaaagaagccataaattactcttttaatatttttattatatctgtagcttctaaaaacaattgatttatcttatcttggatttcttttgctatttcctcttcactttctaaatctgttaaatatcccactttccccgaaaacaaccttctttcacaaatccatatatctaaatggtctatacaatagccatcttcattatcatgaaagtcggtaccatccaaataagctacagaaaaaaatattaatgagttataactattctcaaaacaatctgagggctgtacttcgtttcctattactttttcgtctccgactcttccaaaagcagcttcaattttcaatcccatttttctaaacttttcttgattgttttctattttgtttaatgcgattcgttcaaattgtttttctatttgtaagatttctttttgtgtaatagagttgagattgatttttttcatattatgtctcgttcagcattcaaaacatttactactgtcagtatctgtacagtaagtatcctttaacattaattgcaagaatgtaaggaatcagtcttttacaattcattctttatgatttcttccattgacattcctgcaaaatatttatagagaatagattctacagatgaatgtccaaatatacctaatgggttagggatgtccttgcctgttttctcatctgcctctgctaattcatcttctgatgcaaatgaatcgccttcacttatgagatatttaccgtcttcatataaaacaaatttcaattgagaatgactgtttttctctattatctcttgaggcatcttggatattactttccaatctccttgcagaaaacctgtgtgcccggtattagccgcaaatattttcttattttcttctttcattagacgaatgatttcttctctgctaagtgtattttcagtgaaaatattataatactgaataagaatgtcatcgtctttattttttgatagatcaccttcaatgacccaagcataagtatacttcccgatcttatccaaaggtatttgaataacagctcccggtgttactttagctattggtttcactttcctggtcgttgcctttatttctactattcgcttatcaactaactctgtgaaagaagaatctccatttgtattcattacggtaactaaagttgctaagaattcttctaatatcggttctctatccagctccctcttatataattcacaaaatttctctacagcatcaaaacatatatctaagccttcatcactaagtaaaactttcttgtttttatattcttcttcccaatatcccaatagaacggccttctttcttttataccgcttcttaagattatatttcctcggactttattagatatattagtagtatttaaatttttaatagtattcctttagcttaccagttctcgaagaatcccatggaaggtatcagaaactacttaacagaaaaaggttgttgttaatatcaatccctgcacatttatctttatatgatgctacatgtgtaaaactgatactttctgcagtattctcatccattattatttgttttgtatagctttgcatattatttgtcttcagagctatctcaatattataagaatcctcatcacgaatgaaaaaataactagatgtttcggatattacgcatgaagcacactctatttcaatctcaattcgttccaatgtttctccaagaaagtttaatttttgcaagtaattttcactcattgatctgtaatacaaatagattgcatctttatctacaaatgtagaatagtactggtcaacaatatatggattaacgtcacgagcacataattcatatagtccatttttaaaaacgaatttattaattcctttcgtgcttaattcggaatcaacgcaagaaaatatgcccgcttcatcatatccgacccatagattcttattttgatctattatcattgaattaacgtatcttccagcataaaaagattggtagaaacctttaagtggactccacaaatatatgttgggatcaacatttcgaactccgtcctcgtactctttatctattaaaagtaaaaaagtatcgctaactttttgcacgtttataacttgttcatttgtttgtatgctaaagctattcaggaattgtccattcgtattacaatacagatcaatttgattaatatatttgttgccataatcaatttctttttttgttaggacaattatttctgattcagtcaacgttagcagaactgagtcttcctcatttacttttacattcaaatctctaaattttaattcatccatggatgacatcctctcctgtatctgaaaaggaagacagatagaatctgtctctccttttataaatttcaataaggatagcttgttacaacataccttccggacttaacaacctttacagtataagtatgccgaccattcgtttttcttcctataggctttttaaactttttataatgtactgtcctaccatctttctgagtgtatgcaggtttagttctagctgttgcctttgttgttcttctaagagttttagcacttctaaacttgcttttcggttggccatttggcattcgggcttttgacttaggtccatgatcttttttgatatgtttccaattgaagtttttaccagattttacaaacctataaacccttttagcacccttaaataacttcccaggaccaaagttcgaagccgcagcccaggctgcacctctccatcctttacctgatttatatgctttatatccatcataggctgcaaatccggcatttaccacaagccacacccaatgcccatccggatcgacgttcatgactgggttgttgtttccgtatgcatacccattctgatccagcgaatcgccgtcactgcccgggtctgggtctagtgataagaatacgccgtttcttggctcgtagtagcgggccatgagatagtacaggccggtttcttcgtcgtattggtagcctgcgtagcggtagcggttgtcttttacttcgtcgctcgcttcggtttttgtcggatttccccatgcatcgtattgatatttggcaacggtttttccggtgctgtctgagatggcgatgacgtcaccgtgtgcgttgtagtgatagaaatatttcttgccgttctctgtataggataacagctggccgctgtcaccgtacgtgtatgatttagtgacgttgttgtcggcgtctgtttcatacaggacattcaagctgtctccgtcgtagaagtagttcgtgacgtttccgttgacggttttttggattctgtttcctttttcatcgtatttgtatgttgcgaacggcttgtcttcgccttttttcgtgacggcggtcaggttgtcttccgcgtcccacgtatatgtgtatttgccgtcggatgtgcggttgccgtttttatcgtaggacaggtcttcgtcattcaccttcgtcagctggttcatgatgttgaaggatgcgttgactgatttgcttgcgccgtccttggtggcggtgacgtttgtccggttgccgaagccgtcgtacgtatattgaatgacggtgccgtcttcatgagtttctttgacgagctggttgagcttgccgtattcgtactgcacctttccgcccgctgagctgtcgatgaccgtgcggttgccgttggcgtcgtattcatagctttcccggaagatgctgccgccgtttttcgctccgatatgaagagagctgacaagattccgctcatcatatgagaagctcgtgccgacttcatttccgctgatgaatgtctggacattgccgttttcatcataatcaaatgtataggctgaagtgccgtctttcatttcaatcatttgatcaagtttgttgtacgtaaagctgtttgttcctttttggccgccgtggctccatgagaaagttttcagcttatccgaatcagccggatacgtccagctttggctgccgccgcggtcggttaattcggtcaggcggtttttgttgtcaaaggtgcgttttttcgttgtattttgttctttgtttgtgaccgatgtttcattgccgtttttgtcataggtaaagttgtatttttcagtgccgttatacgcttttgacttaacccggtcggtgccgtcataggtcagcgacacttcattgccgttggcggaaacggttttcgtcaagttgctgttggcgtcatattcactcttcagtacattgccgagcgggtcggttgttttgacgagcttgcccatgacgtcatattcatattgataggtctggtctgcgccggcccgaatcgtttttgtcagctcatttccttccttgtcatagctgtgaaggatggatgtgccgtttgacagggtcagctttgtcagctggtcggcctgatcgtattcgtaggcggttgtttcgcctttcgcgtcggtttcagacattttctttccagtctcgtcatatgaagcagtgcttgcataccctagttcgtcttcttcttttgtgacgtagtttgctttttcgtcataggtgtttttcgtcaggatgcttccttcgattaaacggatatcatcaaaccacgccgttcctgtggcgcttttttggaacagaatgctgagttcgattttattgatcggctttgttttcggaatgactgccgccgcccggttccattcctgtgtcccctgcgggaatttggcggtgtagacgcccgttgtgccgtccgcataagtgacgttagcctgaagagcgtaatcattgtcgttcgtaaattttacgccgtcagccttggacatccctgtcagcgtgatatataccggcttatcgtccgcgctttggcctaatgtaacggtttgttttgcggccgcattggcttgtgatgcatttgtgcgggacgcttttaatgagctgtcatcatcgaagccttcatcaaggtcagcggcggctccgcttgtgctccagccatctgttttggccgtgaaactgctgttttgcaccgggttatagcttgaagagacttcgcctttttccagctgaacctgatcaaaccacgcttttcctttaccgtccttgtcgttatgatccacttccatatagacgatggcttttcctgcattggccggtgttgtaaaggtgatctgccgtttcgtccagtcattctttccggctaatgcgcctgattcattgtgaatccattgaatgcgtttttggtctttgtcacgcagatcaatgttgaaatacgctctcgccttcgtcagatccgttttgatctggccgctgagtgtatacgtcgtattcggctcaagctgcacttcctgcgttgcggacgcatggccgtgctctgttccggctgaagcggattgtgacgagatctccaatgctttttgtccggacagcgcgccgcttcttgcttttacagatgcaatacttccgttgtctctcgtagcggtgagattccagccaagctttgttccttcaaagctgccgtctttcagcaggctcgccgaagctgccagctctttgcttgattgaatgagatttccgtatttgtcatacacggcggcggatgaggattttccgctttgatccgtctcagaaacggcatcaagcccgtcgtacgcaatatcagtgacgttcccctcggtgtccttcattttcgttacgtcattgtttttgttgtactgatacgtttcggtgccgtagttgtcttttacggctgtgacgttgccgtctttatcatattgatagctttctgtcgctttgcccgcatccgcgtcgttcggatcggtgtcctgaatgacgttgttgccttcgtatacggtgttggtcgtgattttcagcccttcggcatcatcgatcatctgaatcgggttgcccgcttcgttatagccgtactgcactttgcggccgttcggctgcgtcatgagcagcgtttttttgtccgcgtcatagctgtagtcgtacgtttcttttttcgcattgacggctttggccagacggtggccgctgtattggtattcagtgaacagcggtttgtcatccgtgctgtttgcggaatactgcttgacgaggcgcccttcggcatcatagtcgtagcttgtgacgctgccgtcagtatccgtcacctttttgagaaggtctttgtcatatgaatatgaaatctttttgtttttcggccctgtaagagatgtgacatggccgttttcatcataggtaaatgtcagcttgcgccctgatgcgtctgttatggcggtcagctgattgctgtcgttatattcgtatacggttgtgttgttgtgtccgtcaacgattttttggagcttgccgccttttttgctgaaataagcgttcgtctgatcttttgtttttaatacaaattggtcgcttgtttccgccagttcgagataaacgcccgtcggcggctgatacgtgccgtcagattttttcgtgaagacatgtgttgtcgcgtcctcatcaatataaacggctctgccgtcttcagaaaggatcgacgtttccgcatcggcataccagccttggccgaacatatggtcagagctgtcaaggctgttgaatgtccgggagagcccgagccccggcccgcgtccgtcgattgacatatcttcctcattgacgatgacatttcccgtcgcgccgttcagctgtccgtccggaatgtcgataatagaccagaattcttccgttccgaggaattccgccccttcatggaaaacagggttaaaaggtgccgtcggtatgctgtcaccgtttgcgtcataggcggtcagcgtgaaggaatagttcttcttccctttgtaattgccgtttgcgttttcgtaaacaggtgaagggtcaagcgccagttcgccgccctttccgtccgtgtgaagctggaatcttcccgctttcacttcatcagctgacggccagatgcgtttgttttgggtcgtccaatgatcggtatccccgacatcgaatgattgatagtcttttccgttgtaaatgttgattttgtagcctttggcgtttttgaccttatcccatatgagattgacataacccgtttggctcgatttcgtgttcgtatagacatagcctgtcaggtttttcggctttgcgatatcaggcagcgccggactcgcttccggtgaggcgatcgcttctccgtctttgttataagcaatgactttaaatccgtaggttttccggttcgcatctcctccggcgtttttataaacggggcccgggttgatcggcaattccgcgccttttttgtctttcaggtgaagcgcatattttccggcgctgatttccgcctttgtcggccagatgttttgatcttttgtggaccaggatgttttatttccgaggtcaagcgtttcaaagcctttgccgttaaagacttgcattttatacccggctgcgcctgatacggctttccaggaaagatcaaaccagcctgtggcgttgttgttattaaagcctttcgtgctcggtttctgaactcttccaatattcggaatgacgggcttggcggccgcagacatggcgccttctccctggtcaaacaccgcgctgaccgcgacccagtaatttttacttgccggatagctgccgccggagtttttatagaccggcgaaggattaagcgctaattcacttccgccttttccgtctgtatgcagcttatatttgccggagtcgatttccgcttttgtcggccagatgttttttccttttgtgctccaagaggttgcattgccgaccggaatggcctgatattctttcccgttataaagccagactttatagcttttggcgccttcagcttttttccagctgatattgaaaaatcctgtcgaatctccgttatgatacgctttgacagacggcgtgtccgccttcggaatcgtgtatgtcacttcaatgtatggttttttagcagagtttgctgatgacatcagcttcttccaatactcttttccgtttccgtttgtgtgaagcttaaagccgtaattggcgccgccgctgttccacgacttgactgcggaggtgacatcgaagcttgcccattggcctttatagacctcggctttgccgatgtttttggagcccggcttgttcttccacgtaatcttggcattgtcgtaattgctgttaacggtgtcgagccaaagccccgtcgcttttgatccgtaataggagtgggctgtgtacgctttgagcgtcgctttcgtcaccgtcatgtttttgatcggctttagattatcaaacttcataaaagcgtagttcgttccggttgtgccgtcataatatccagttttcagcacgtacgctttcaatccggcgtcccatttctgcgaagcggcagagtagtttgtcgtcgggtacgcgctcatgacaaaggtatcggatgacacagatactgatgttgaagggtcaatagataccggataaacccgcttgggatctttcagccatttttcatcggccgttacatggagcaagtagccttcgctgtttttttcaagcttgaagctgacattttctgacctgttgacttcacctgacttttcgtcgagatctgagtcggtcataaagggcttcggcacggtgtagacgacattgtctttatcatcagaaaacgcgatagagccgtcttcctgttctttagcctgaaggtcggttttgatttgaaaggtgaaggaattgtagccttcatatttgtgaagcacaaggtcttcttttatgttttcgttaaatgtgtaggtttgtaaatcaattgcaggaaacacttgctgatacgtaagctcgttgctgtcttcccttacttttgctgaggcatctgtcggagtaattgcagcctgatcggggccttttgcgccggttaatgagtatgtgagcttatgatcattgtgttcaaatgtagcgtataatccgtttttcatttgcttcagaaaatcggaattcagcactgtattttccgttccgacttcctttgagccggttttcaattcaggagaaacgtcttcccagtccgcattggcggtttctttcgtatgaatggggtctgtgtagatttcctgtttgtacacaccctcgccttcatagtaaagctttgaattctcagttctttcagacgtgatctcaccgtcttgattaatatctttttgatcaaaaggcatctgctcagatgctttttccgccggaagatctttttccgggtctgcagccggaatggcggcggttttcgcttgatcttgtttttcacgcgtttctgccgcaaacacatcggcaggcgcaatggaaattatcagcgttgccgcaagagtgccggccagccattttttccacttgttcttttttcctattttcataggttctcctccttcttttgtaatataggcttaacaatagtaatattattgaaattgtttatcaatattttcctaggtatttaaggttattttaaggattatagggattttgaaccttttattcatataaaaaaaccgccggctgccggcggtttttcgtattatggatagcggagatttgtattttgcgctcccgcgtaagattgggcgaagtttttggcgtcctgggctgagagggtgccgtagctgtaatttgatctcggattccagctggtgcgcggtgatttcggggccttgagcgacgggaatgaaccggtgtcggtgaattgggccgtcccgtagtcgtctatcattccgcctttttcatttccgttaccgaaatagttggcttctgagaagacagtcgcgtttgtatgaatggtgaatcctaaattgaaattggtcacatagttgtttttcgcgtgaaaatagccgtatctcatcaggcccggtgaacgcacatagacgttattaaaatagttgttggtgatcgtcatatgcggatagccgatataattgcgtccttcgttatcatcattcggataaccgagaatcaggccgtacagatggtctgtgaatttagagttagacagcgtcacaaaatccgctttggcgccgacatacagaagctttcccaaatcactgtggctgttcggattgtagctgtgtccttcaaaccacacgtggtcaatccagtaattctgtccgttcgctatgtacatcggaatgtcgttgttgcccgtaatggcggcactatggctgataatgagatttttgaaaatcacattgtttgagccggagccggtggtcagatagatgttggtcagcctgtggctggtataagagccgacgatggttttattggcgccgactgtcacgacggctttacccggggaagaaatatcacttgtgatgacgatggttttgcgatccgttccgcccgcattatttttcaaatcattgagattgctgacgtagacgacggggccgccctggccgcccgatacggcggattttgcttttccgttatgatccttcgcattgcccgcgaatccggtaagtccctgcatcacatccggataagccgctgccgcttctgcctgctttgatgcggaacatacgatggccagacaaagcgcaaagccgagtgcagccaagaaagcgagatgacgcgtcttctttatcatgcccttcactcctttaatttcttaaattgtaaacacaagaagtattatacaattactatcctctttttccatgatctgtttgtctgctttttcgttatggctgaaaagccccaaaataaaaaaagcagccggtacggccgcctatatacgggtgctgtctgcctgagtttccgccggcacggctttttgctttcgaatcagggacagcgccattcccgcaaaaatcaatacaatccccaaagattgataaaggtcggggcgaaatcccgtaaatacggtgtcaagcacaatcgccaccgccggatcaagaaatacgatgattgaaataaaccgggtggataaaaaccgcaagctgtcaaaaaagagcaaatacacaattcccgtatggatgataccggtcgacacaatcatgatccagttcacatgcgacaaatcagaaaaagcgccgaaacggacgaacggaagaagaatgataacgcccaatccggtctgcaaacaggtgacggcgtatgggctgaggctgttgatgcctttcccggccagtgtcgtaaaagcataaaaaagagcggccagcacggcccaaataatacccgatcccatcagctgagaaaatgatgtacttccgttgatgccggaaatcagggcggtgcccagaaaacaaattacgatggaagtgacggacaccatatgcagtttctcccggtatataaggctccccagaagaaggacgagaaccggagccagatgataaacggaaatcgctatcgtcactgatgtctcctcaaacgatttaaataaaaacacccagttcagcacgagaaaaaatccgcaggccagtgtctgcagcacctcccgccggttccattgttcggtgcggtaccgtccggaaccaaaccagcaaacgcccagaaacaatgaggcgcacagacatctcacaaagaccagttcaattgaaggcacattcgtatgttctgagaaaaagccgattgatccgaaaatgaccatggaaatgaccattttgatgacggcatttgatgtttgttcagcttgcattgatttgcttcccccatatcattgactgtttattcagacaaatactaacagccattttacttgattcagaggaagatttcaccctatttttcgaaagccggcggtcttttctcatgaaaaaagccctgcatcagcagggccttctgtttaatgaacgatcagtacaggacaaggagacaattgtgagaccttatggctcacgcttccgagcatcatttctttaaatccgctgattccgcggcttccgacgacaatcagattgaaatgctgttctttcgctatgtttaaaatttgatgcgcaggttcgccttggacgtacaggctttccgcgtttactccgctttctgccgctttctgcttggcatcttccagaatggctgctcctttttgctcgacttcatgtttgatgtcttcaatgaagttttccggaacatagacaatcccggttaaagctgatgtggagacaacggcttcacgtcccgcatagagaatggtgagttcagcctgctgttctttcgccagatggatcgctgcgtccagggctttattgctcatgtctgaaccgtctactgctgcaagaatttttttaaacatatgaatcccgcctttctgcttttattgtcctcctctctttgctgaatgtcaattttgccggctttctccggaacattgcgcttacagactttctccgtttgtggcgatgacgtctttataccaataaaaacttttctttttctttctttcaaacgtgccttttccgtcattgccgcggtcgacatagatatagccgtagcgttttttcatttctgccgttgaggcgctgacgaggtcaatcggcccccacgacgtgtagccgatcaggtcgacgccgtcttcaatcgcctctcttgcctctattaaatgatcacgcagataattgatgcggtagtcatcctgaatggttccgtcctcctccggctgatcaaccgcgccgagtccgttttcgacgatgaagagcggtttctgataacggtcgtacagcgtgtttaaggtgatgcgcaagcccttcggatcaatctgccagccccattcggaagatttcaggtacgggtttttcacgccgccgagaagatttcccttagattgcgccagatcctcaggcgccgtgctggccgtcatcgacatgtagtagctgaagccgatgtaatccaccgtatgttctttcaggagcgcctcgtctccttccttcatctcgatcgtaattccgttttctttaaagaagcgtttcatatagcccggatagctgcccctcgcctgtacatcagaaaagaacagcgtgctccgctctttttgcaaagccgcatatacatcctccggcttcggcgtcatcggatacgtcgtcgttgcggcgatcatgcagccgatctgtgaatccgggatgatctcatggcctgcttttaccgccagcgcgctcgccacaaattgatggtgggccgcttggtacatcgtgttttgtttattttcgccttcccggaatataaggccgccgcctgtaaacggagcgtgaagaacgacgttgatctcattgaaggtcatccaatatttcaccttgtctttataacgggtgaaaaccgtgcgggcgtaccgctcatagaaatcgaccgtttggcggtttctccagccgccgtagtttttcacaagaccgagcggcatctcatagtgagaaatcgtgacgaccggttcgatctgatgttttctcaattcgtcaaacaaacggtcgtaaaattgcagcccttcttcgttcggttctgtttcatcaccgtttggaaagattctcgtccacgcaatggaggtgcggaacgctttaaagcccatctccgcaaacagggcgatatcctcttgatagcggtgataaaaatcaatcgcgtcgtgatacagattcagcgcatcgtctgtctcatgaaacggagacataatgccatccggggagacatccgccgtagaaagtcctttgcctccttctttataagctccttcaatctgattggcagccgttgcgccgccccataaaaaaccttccggaaatctcatgttttctccacctctttttcaggataacgccagaagcgcttcgttcggtttgaccattccgctttttttcacgtctgtaaatgaatattgatccgtattcgtaatgatgaccggcgtgatcacgtcaaaaccggcagcctttatctcgtcgatatcaaaagtaatcagcagatctcccggtgcgacagtatcgccttctttgacgtgcatctcaaaatgcctgccatccagccggacggtatcaatcccgatatgaatgagaacctcggctccccgggtgctcgtaatgccgatggcgtgcttggttttaaatacggctgtcaccctcccttctacgggagaaaccgccgcgccctcttcaggcagaatcgcaaaaccttttcccatcattccgccggaaaagacgctgtcgttcacttcgcttaatgctttcacttcgcctttaatcgggctgtgaatgatttctccgcctgccgtcacccccggcgcttcagacgctttgtcccgttcggactgtacatcctcaaacccgatcagcagtgccgccgcaataccggccgcaaatgagataaaaagcccgatcagcgcgtaaagaaatgtcggcccgataaagaccggaatgctcggcagaccggcgtttccgccgacaatgtaagaagcgacgcccgttacaccgtaaaaagctccgcctgccgcgccgccgattaatgctgccgcgaacggttttttcaatctcatgttaacgccgtacatcgcgggttcggtaatgcccatcaatgccgtaatgcccgtcgtaaacgccagcgatttgaaggttttgtttttggattttaagaaaaccgcaaatgacgcgccggcctgccccatattcgccaaaaacatcgcgggcagaatgtaatcatgtccgttttgggcgatgttattgatcatgatcggcacaagcgcataatgcataccggtcataataatgagggaaaatgtgccggcaagcagaatcatcgcggcaatgcccgcatgattgaacaaatcattgacgccgacagacaggtaattcccgagaatcgcgccgagcgggccgactgtgatcaaggtgacaggcacgacgatcacaagcgtaagcatcggaacggcaatcaatttcaaagaagaaggcgtgatgcggtcaattcctttctctacacaggacatcagccatatcgccagcaaaattgggataactgtcgatgaatacgtggcagcggttacaggaagaccgataaaggagatgcttttccctgctccaagcagggccgttaaatccggatgcagaatcgcacccgccacagcggccgccacgtacggattacatctgaattttctcgccgcgcttaccgcaagcaaaagcggcagaaaataaaacgcaccgtcaccgacagccgtgagaatgctgtgagtctggctcttctccgacaaccagccgaatgtcaccgctagcgcgacaagcccttttatcatgccggctccggcaatggccggcagaatcggtgtaaacacaccggaaatcacgtcaaatacggcactcagcacatttttcttctgcttcgaagttttgtttgcgctttcatgactgagcccgctgctctccatcaaagcctgatacaccttcggcacatgattgccgacaatgatctgaaattgcccgccgctgatatttgtccccatcacgccttccgtttgctccagcccgctccgatctgctttcgcattgtcatatagattaaaacgaagccgcgtcatgcaatggatgacactctgaacattctcctccccgccgacaagttgtaaaatctcttttgatattttatgatagtccatgagtatacctccttaaaaatgggggaactgccggacgaaaggtgcccgcctttctccggctttttttgttatgaaatcagcatcacctccgaaaaaagggtataaaaaaaacccaaactgcacagaacacgggggtctccccctgtctgacgcaatttaggttttgcctgcggtttgcagtaacaatccttggtgaatgatattgggttgatatgtatactttagcactggatttattgggtgtcaacgcttacatttaaatgttgctccaactaccatttaatgctttatttataaaataatttgtctatttctattgtaatcaaaaatctattcaatatccttatagaacaatttaatattaagtttttccataaatcagtgtggagtaaagaaagtacaatttataataatagtccgtagctgttctaatcactacggacttatagcaatttaaacttttagtcttcaacaacttgtaagaattcaaagttcatttcgttaatcaattcgttcatagctcgagcatttgtagaagaagcgttaaacttaggatcttctaaatacgaattttttaaagtatcagatatataagttagaaagttatctattccagctttttgttttaatctagatagtgagataccttctttaatcattttgtgaataacaccagaaagtatcattgctatagttatctgaaacctataccctttgcttgagacaccataaatttctttagaaaaggggtgctcaatcctttctccaatttcttcaattatttcattaaatgtattaaatctatttatgatctcatcatattccttttgtgattgttgtggattacatacttctagtttagatttatgtttcatatactcttcagcataaactgatgatttcgcgtatcctgtattaagtccattttcaagtatactcattatcacaaaaatattttcttgtattttcttctttttcaccctatctgttgttgcattgtaggccctctgaatcttactggatacctttttatcattcattttttgagcaaatttatttacaaaactattcaatttagaattataaacagcatgccgtatatcctgcggtgttaatggcttggtacctttattatatctactaaaaatctccaattctaattcaagaccagggaaatcagtaaaaacgatagaggcaagtttgtgcgataaaattttctctttaatttcaaattcgcaatcactaaatttttttccatttaactccaccattatatttagtcctgaaagtttaaattgattttctttaaacctatgaaatgctctcagtcgatgttgtccatctactacgtttaaaactttaactccctcataacgatcattagctaaaaaaacaggtggtattggtataccaagaagaattgactcaattaaagaactttcgtcagcaactgatgctctgtaatctctctgatagtcaggggcaattataattgaatcagtataatcaagtttgagttcatcatctagctcttcctctttatctagcttttgaagtttgtatccatttgtaatcatagatataatatcttttatagcgatatcctgaggtttataatttattttagctagcaagttactcaccatcccttacatattctaaaatactctttttcattattatatcttttgtaacagattccaattctggataaagtgttgtataacctattcccatagaataaagagaggacagtatatcttttttgcactctccgttgatcaccaatcttctaattatattttcatctttcaaatctgataaaggttggcagttatcttgaaaatatacaaaaagcccattttgtgcgttaattctttcatttaactttctagctttgaatgctatcggcccatcaaaattatctaaatttattctttcaccattagaaatattaattatatctgaacgtgatgcaaacttataattcaattctaaaggatttagaaaccatacttctgcatcacattcttcattttcatggaaggagttttcaacagcaaacattaaagaaactacatgtgaatgagtaaaatctaacaatttagttgggatgccgtaatgttgtgcataaaccatccactcatagtcatctctgatatctataggttgcttcacataattgtgacaattcactttaaactcatttaaaaaatattgaattgatcctctcgaatatttcctctttttgttattatccaaccttagggcaccaggtaacaattcgtattctttttcctgccctcttgataaaataaactctttaggtagcgcttctacaaattcagtaaattgacttagcctctcaataggttcatctaacaatataaatttcctcctattttttaacgtgtcatttattttatgttgtagtctaataaacttatcggctaactttcttttttatttagttgaatattacgtatctgtaaaggtttaactatataaaaaacgaatctctccttcagataataataaagaagagattcgttccttagagatttatatcatatattaaactttaattggttcacttcactccccaaacagcctccccatcaccgctcagcacactaaacgtcacaacttctttctctctcgctgagtcccattctttcaggaagacgccgccataatttgtgccgttcaggttaattcgggctttgctgctgtccgtttttgtccaggttccggtcatttccccggaaatggtgccgtcgttgttaagctggatgttttttggggttttgatcgtagctgtgatgtcttttccgtgctggatgagtttgtaggctccggatgcggcggccgccggaatgtgtgtatccggttctcccgcatagcggtatggcgctgcaacgggccatccgtctttgttcatgtacagctgatgtactctgacttcgtgctcttcgcctctgttcgggaaacgggtgtggaaaatgaggtatgatcgtttcgttttcccgtcgtaaaacacggagttgtgtcccggcgatacgtagcccgtgcctttttcagattgtgaggcgaagctgtagccgcccatgagtttgaccccgtacggttcaattgctttgtcgtcaaagaaactgccgtcttttcctttggcatcaagcatgttatggcctgcggcgtcatagtacggaccgtccggatttttagagcgcgccacacgcatatgataaccgccggctgcgtcaagtccgccgaatgacagatacagatagtaatatttcgtttccggattgtagctgatgtacgggccttcgattctgctgtgatttccgccgagcagtttttttccgtagccttggttcgggagcgggaaaccggttttcggattcatttccattatgaaaatcccgccggagtaagagccgtacaccatccagagcttgcctttatggtcaaaaaacgtttgcggatctacgacgttcgggtgaacgtttgcattatacgtcgtgccgtcttcgctttttccttccatgcccgatttcaaaaagatgcctttgtttttgtagggtccttcgatcttgtcactcacggcgacaccgagagcggatcgcggcgagtctcctttacaggcgttatagtacatgtaatatttcccgtcagacagctgggcgacgtccggcgcccacagcgtatcagactgggcccagtcgaatgtctcttttaattcggtgtagacgttcgggatcaggggattattgggattgacgcttgaagacatctgctgccactgcatcaggtttttcgacttggcggaagccaaatgcgagccgaatacataatatgtatcgcctgttttgatgacggacggatcatgcacgctgacctctgaaaaaaccggatgctgggcttttgcctgcggcagagtgaacccgatgaccgctgctgagaccaggcacacacgaaagaaactggttttcattttctgaaatctcctcgctctcttcttttcttaaaacgctttcaagacaacgctccattttatgatgcggatggcggaaatatgtgatcaacagcgccggcttcgcgatgtaccgctttacttcgataacaatctgatttgtgaaagactggaaaaaaagttttgacttctgattcgcaaacacttaatataaaaaacagttactagttatcagaatatttaagaattgagtgaagcatatatgaccttacacaaagaccgccgcatcgggcgactgtccgtccttcttctgcttcatgagactgaagaaaaccagcagatcagccggctggaacgggacggctggaaagtctgtctcggcagggtgggttcaatggatgcgcataaggtggtagccgcaattgaaaccgcttccaaaaagagcggtgtcattcaatctgagggttatcgcgaatcacatgcgctgtatcatgccacaatggaagctttgcacggagtgacgcggggcgaaatgctgcttggctcgctgcttcgtaccgtgggcctgaagtttgccgtcttgcggggaaatccgtatgaaagcgaggcggaaggcgattggatcgccgtttcactttacggcacgatcggggctccgattaaggggcttgagcacgaaacattcggagtcggaattaatcacatatgaatcagcccatagatttcagatgatagggggctatgcgtgaaatatcattttcatggcatagctcctttttgtatgggcgctttaccaaagtaaaggaaaaggggttgaaatgatggtgacgttagacggttcctcactgacaaccgcagatgcccagcgtgtgctgtttgattttgaagaggttcaagcatctgccgaaagcatggaacgtgtgaaaaaaagcagggcggcggttgaacggatcgttcaagaagagaagaccatttacgggattacgacgggattcggcaagttcagcgatgtgctgattcaaaaagaagacgccgcggatctgcagctgaatctgattctttctcacgcgtgcggcgtcggtgatccgtttccggaatctgtatcgcgggccatgctgcttttgcgcgccaatgccctgctgaaaggcttttccggcgtgcggactgagctgattgatcaactgctcgcgtatctcaatcatcgcattcacccggtcatcccgcagcaagggtcactgggggcgagcggggatttagcgccgctttctcatctcgcactggcgcttatcggtcaaggcgaagtcttttacgaaggggcccggatgccgacagctcatgctttagaacagacaaaccttcagccggccgtcctgacctctaaggaagggctcgcgctgatcaacggaacgcaggccatgaccgcgatggggctgatcgcttacctcgaagccgaaaagctggcctatcagtcggaacggatcgcgagcttaacgatcgaaggccttcagggtattatcgatgcgtttgacgaggacattcatgccgcccgcggttatcaggaacagatggatgtcgcagagcgaatccgctattacttgtcagacagcaagctgacgaccgtccaaggggagctgcgtgtccaggacgcctattcgatccgctgtattcctcaagtccacggcgcatcatggcagacattagcgtatgtaaaagaaaaattagaaattgagatgaatgccgcgacagataacccgctcattttcgaagacggcgccaaaatcatctcaggcggaaactttcacggacagccgatcgcctttgccatggattttctcaaagtggcggcggccgagcttgcgaatatttctgaacgccggatcgaacggcttgtgaatccgcagctgaatgacctgccgccctttctgagccctcagcccggcttacaatccggagcgatgatcatgcaatatgcggcggcctccctcgtgtcagaaaataaaaccctggcccatcccgccagtgtcgattccattccttcatcggcaaaccaggaggatcacgtcagcatgggaaccatcgcctcaaggcacgcctaccagatcattgcgaatacgagacgggtgcttgccgttgaagctatttgcgcgctgcaggccgtggagtaccggggtgcggaacattgcgcctcgtacacaaaacagctctatcacgaaatgagaaacatcgtgccgtccatacaagaagaccgcgtgttttcttatgacatcgagcatctgagtgactggctgaagaaggagtcttttctgccgaatgagcatcaccaaaaactgatgaccaatgaagggggacttacaagatgactgatgtaaagaaatcaatccgcgccggccgcggcaccgaacttgaatgcttaggatgggagcaggaagccgtgctccgcatgctccgaaacaaccttgacccggaggttgccgaaaagccggaggatctgatcgtatacggcggcataggcaaggccgcacgaaactgggatgcttttcacgcgattgagcgttccctcaaaatgttaaaagatgatgaaacactgctgatccaatccggaaaaccggtcggattgttccgcacgcacagccgcgcgccccgcgtcctgctggctaattcggttctcgtgccgaaatgggcggattgggagcatttccatgaccttgagaaaaaagggctgatgatgtacgggcagatgacggccggaagctggatttatatcggctcacaaggtattttgcaaggcacctatgaaacctttgcggagcttgcgagacagcatttcggcggcagtctgaaaggaacccttacgctgacggccggacttggcggaatgggaggcgcccagccgctgtccgtcacgatgaatgatggcgtcgtcatcgccgttgaagcagatgaaacacggattgataaacgcattgaaacaaactattgcgaccgtaaaaccgcatcaattgacgaagcgctgcgctgggccgaagcagccagacaagccggagagcctttatcgatcggccttctcggtaatgcggctgagatgcatcatgagcttttgaaccgcggcgtccatattgacatcgtgaccgatcagacttcagctcacgacccgctgatcggctatattccggcaggatactcacttgaagaggccgaccgcctgcgccgggatcagcctgaattatacgtaaggctttccaagcagagtatgaaaaagcatgtggaagccatgctcgccttcaagaaaaaaggtgccgtcgtctttgattacggcaacaatatccgccaggctgccaaagatgagggtctcgccgatgcttttgattttccgggattcgttcccgcctacatccggcctttattttgtgaaggaaaagggccgttccgctgggccgcgctgtcgggtgaccctgaagatatataccgcacggacgctttattaaaagagctgtttcccgaaaatcaagcccttcaccgctggattgacatggcacagaaaaaagtcacattccaaggcctgccgtcccgtatttgctggctcggctacggtgaacgggaaaagatggggctcgccatcaatgaattggtcagaaacggcgagctgaaagccccgatcgtcatcggaagagaccatttagactgcggatctgtcgcctctccgaatcgggaaacagaagcgatgaaagacggaagcgacgcggtcggcgattgggcggtgctgaacgcgctgatcaacacggcctcaggcgcaagctgggtttcttttcaccacggcgggggcgtcggcatggggtattcccttcacgcgggaatggtcgcggtcgctgacggcagcatccttgcggaacaacggctttcccgcgttctgacaagcgatccgggaatgggcatcatccgccatgcggacgcaggttatgaaaaagcggctcaagtcgccgaggaacaagacattatgataccgatgaaaaaggagcggtaacatgccgaaacaaatagataccatactcaccaacatcggccagctgctgacgatggaatccggcggcccccgaacaggcggaagcatgcaggatcttcatgtcacggaagatgccgtcatcggcatttccgacgggcgcattgtttttgccggacatcaaggagcggaggaaggatacgaggcaagagacatcatcgactgcgggagacggctcgtcacccccggcctcgtcgatccccatacccatcttgtattcggagggtcccgggaaaaagaactgaatttaaaaattcagggcatgtcctatttggatattctggcgcaaggcggcggtattttgtcaacggtcaaagacacgaaagccgcttccgaagaagaactgattgaaaaagggctttttcacctcggacgcatgctgtcatacggcatcacgacggcagaagtaaaaagcggctacggactcgacaaagacacggagctgaaacagctgaccgcggcgaaaaaactgggcgaacaccagccggtcgaccttgtcacaacttttatgggggcacacgccattccgcctgagtaccggaacagccctgacgaatttctgaatcgcatgctgcagcttttgcctgaaataaaagaaaaaggcctcgcgcaatttgccgatattttcacagaaacaggcgtctttaccgtcagccagtcgcgggactacctgaaaaaggcgtctgaagccggtttcggcctgaaaatccatgctgatgagattgacccgctcggcggcgcggaattggcggcagaactgcatgctgtttctgccgatcatttggtgggggcgtctgacgaaggcatcgaaaaactagcggcgtccggaacaatcgccgtcctgctgccgggcacgactttctatctcggcaaacacacttatgcaagagcccgggagatgattgatgcgggcgtacgggtcagtttggcgactgacttcaacccgggcagctcaccgacggaaaatctccagctcattatgtcgattgccgcgctccatttaaaaatgaccgcagaagaaatctggcacgctgtcaccgttaatgccgcgtatgcgatcggaaaaggcgaagaggccggacaaattaaagccggacgggcggctgacattgtcatttgggaagcgccgaattacatgtatatcccgtatcattacggcgtcaatcatgtccgccgtgtcatcaagaacggaaagacggtcgtttcaagggagggagccgctcttggataagtatccgtttctgcaaaaagccggctccctcttcaacgaccgccatgtgacaaggatcggcgatgtgacggaagcgtgggcgggacaaacgatcaaagggccggctttgatcggcgttccgctttctaagtcgtcaatcagccattccggcgcctgctttgcacccggtgcgatccgccgggcgctcggcgggatttccgcttattccgcggagctgcgggagcatgtcattaaccatctgtacgatatcggcgatattcagattcacgtcacggatgtcgtcacatctcacgaacacatttatcggaccattcatgacattctgacggaccagcctgactgggtgcccgtcattctcggcggcgacaactccatcagttattccaccattaaagccattgcggaaacgaaaggaacaacagccgtctttcaattcgacgcccaccacgacgtccgcaacacagaagacggaggaccgacaaacggcacgccattccgccggctgttagatgaaaatatcataagcggacaaaacctgattcagcttggaatcagggagttcagcaacagcttggcatatgaacaatatgtaaaagagcggcaggcagacgtgcatacaatggagatgatccgggagaaagggctcctccgaacgatacaagaggtcttgccggccgttcaaaaaagagccgacgccatttttatttcggttgatatggatgtgctggatcaagctcatgcgcccggctgccccgcgatcggcccaggaggcctgtataccgaagaactgcttcaggcggtccggtttttagccagtgaggctgacatctcgggtattgagatcgttgaggttgatccgacacttgattttcgcgatatgacaagccgggcagccgcacacgtcattttacatgcattaaagggatttaaattgtcacgttaaagtcaaatccggcacgcgtactctcggctgccggaagattctcacgccacgcaaaaagggggagatcacgatggatgttgatcaaggcggcaatcaactcaagcgcacgatgaaaagcaggcacttatttatgatttcattgggaggggtcatcggcacggggctgtttttgagcacagggtatacattgagccaggccgggccgggcgggacgatcgccgcttacctgatcgggggcttgatgatgtatcttgtcatgcagtgtctcggagaattgtcagtagccatgcctgtgaccggttcatttcaaacgtatgcgacaacgtttatcgggccgtccacgggttttatggtcggtatcatgtattgggtgaattgggtggtgacggtaggatcggagtttacagcttccggtatcctcatgcagcgctggtttcctcacagcagcgtctggatgtggagcgcgattttcgcggctctcctttttgccgccaatgcattctccgttaaattgtttgcagaaacagagttttggttttccagcgtcaaaatcgtcaccatccttttatttatcatcttaggcggcgccgcgatgttcggtttgatttcattgcacggttcgggtgaagctccgatgctgtcgaatttcacctcacacggcggactgtttccgaacggctttcttgcggttttcattgcaatgatttccgtaagctttgccttttcagggacggagctgatcggaattacagcgggtgaaaccgccaatccggcaaaagatattccgcgttcgatccgaaatgtcgcctggagaacggtcatcttttttatcggcgccatttttgtgctgtccggactgatctcctggaaggaagccggtgtgattgaaagtccgtttgtcgcggtcttttcccaaatcggtatcccatacgccgcagatatcatgaacttcgtgattttaacggctttgctttcggtcgccaactccggactgtatgcttccacccggatgctgtggtctcttgcgaatgaaaacatgatcagcgcccggttcaaaaaagtcacgccgaaaggcattccgctgaatgctctgctcgccagcatggccgtttcctgcatatccttgatctcaagcatcgccgccccgggcacggtctacgtggtgctcgtggcaatagccggatttgccggcgtcgtggtgtggatgagcatcgccctgtctcagctgttatttcgaaaacattatgtgaaaaacggcggacgcgtctcggatctgaccttccgcacaccgttataccctctcgttccgatcgccgctgtgatcttatgtttcgcttcatgcgtaggccttgcatttgatcccaatcaaagaatcgccctcttctgcggaattccttgtatgatcctgtgctatctcattcgttttttgagaaagaaacagccgaaacaatccgtccgtgacattcatttggataaaaccatgccataaaaaaaggcacatactgatgaggtatgtgcctttcttctcttattccgtaatcagcgtatgaaccagtttcggcgcttccgctttttctgagatgcggatgttgtcatagactttggcggtcacgtcgtcaacgttttcgcggttggcgtaaagggtgacgagcggctcgcctttttcgacgttgtcaccgacttttttgcggagcataatgccgacggcaagatcgatttcgtcctcttttgtcgcacgtcccgcgcccaacagcatcgctgcgacgccgatttcgtcagcgacgatttctgaaacgacacccgcttcttttgccggaacgtcaattttgtacgccgcctgcggaagtttggacggatcgtcaacgacagaagcgtctcctccctgattgcttaggaactctttgaacttttcaagcgctttgccgtttttcatgacttcctgcagcttcgttctcgcttcttccaatgtctcagcttttttcgccaatacgaccatttggctgccgagcgtgagaacgagttcgtttaagtcttcagggccttcccctcttaatgtatcaatggcttcttgtacttccagggcattcccgatcgcaaaaccgagcggctgcgacatgtcagaaatcacggccatcgtctggcggccgacgttgtttccgatgcggaccattgctttggcgaggttcacggcgtcttcatccgttttcataaacgcgcccgcgcccgttttgacgtcaagcacgatggcatctgctccggcggcaatttttttactcataattgagcttgcgatcagcgggatggagttcaccgtacccgttacatcacgcagcgcatacagctttttatcggcaggcgtcaaattgccgctttgtccgatgacggctaccttgtcgcggttcacaagcttgatgaattcatcttttgataattccacgtggaagccttcgatcgcttccagcttatcaatggttccccccgtatggccgagaccgcggccggacattttagcaacgggaacgccgagcgccgcgacgagcggtgcgagtacgagagttgtcgtgtcgccgaccccgcccgtagagtgcttgtcgaccttaatgccttcaatggcggagagatcaatcgtttctcctgaattcaccatcgccattgtcagatcggcgcgctcctgatccgtcatatcctgaaagtaaatcgccatagccagcgcgcttgcctgataatcagggatgcttccgtccgtgtatccttttacgaaaaattgaatttcttctgttgtcagttcttttccattttgtttttttacaataagatctaccattctcatgatctatcacctgtccttcatttatgttcagtgaatcaatccgacgatcgccgctgtcaggaagctgacgagcgttgcgccgtacagcagcttcaacccgaaccgcgcgacgacgtttccttgtttttcatgcagccctttcaccgcaccggtaatgattccgatagaggagaaattcgcgaatgagacaaggaatacagataccactgcctgtgtatgcgcactgaaatggaaatcaccggacgagagcgtctgcatcgccacaaattcattcgataccattttcgtcgccataatgcttccggcgctcaccgcttcattccacggaataccggttaaaaacgcaaacggcgcgaatacatatccgagcagcgcctggaatgtaatgccgaagaccgcattaaaaacgccgttgaccagagcaatgagtgcgacaaatccgatcagcatcgccgctacgacgacggcgactctgaatccatccattatatactcaccgagcacttcaaaaaaggattgcttttcttcttcaggaacgacgatcaaatcctcttctttgctgacggtgtacgggttgatgatagaagcgatgataaatccgccgaataagttcagcacaagcgccgtcacgacgtattcaggcttcagcatcatcatgtaagaaccgacgatcgacattgagaccgtcgacattgcggatgcgcaaagcgtatataagcgctgttcagtaagataaccgagctgttttttcaaactgataaagacttctgattgccctaaaatcgcggatgcgacagcgttgtaagattcgattttccccattccgttcaccttgcttaacgcaagaccgatatacttcgtgatgaaggggaggaccttccaatgctgcagaattccgattaaagcggatataaagacgatcggcagaagcacgctcatgaagaacgtcgtctgtttcgcattcacaagcccgccgaatacaaagttaatcccttctgatgcatattccagcaagtagttaaatccttttgcaaaaccgccgacaagaaaattcccgataccggtgttgaggagaatataaccgagaatcagctgcagcacgagcatgacggcgatcggccggattctgattctttttttgccgttgctggcaagccaggcaagacctaaaaacacaatgattccgataattccgatgagatacttcatatgtgttctccttttatttgtattcgcttacaattttttatgcatcaacaaagaaagaggatggcggaagctttcggcttccgcactgctgattaatagtcgctgctgccgctgtctccgccgctcacgatagagacgcccgcacttgcgccgatccggctcgcgcccgcagcgatcatgctgtcaacatcagcttttgttctgatgccgcctgatgctttgaccccgatgtccggtccgactgtttttctcataagagcgatatcttcagccgttgccccgcctgtagaaaaaccggtagacgttttgacgaaatctgcgcctgcggataccgccaagcggcacgcgcgctctttttcttcatctgttaaaaggcatgtttcgatgatcactttgacgagcgcttttttatcagctgcttcaactaccgcgcggatatcagcttcaaccgcttcatcatcgccgtcttttaatgcgccgatattgatgaccatgtcaacctcagttgccccttttgagatggcatccttcgtttcaaatgcttttgtttccgatgtcgttgcgccgagaggaaatccgataacggtgcaaacgtcaactccagtgcctttcagttcctccgctgcgagtttgacccaagtcgggtttacacaaacggaagcgaatttatattcttttgcttcttttatcagttgtaaaatatccgctttttgtgtatgcggtttcaaagcagtatggtctatttgacttgcaattgacattgtatgcacttcctttttcctaggatacgtttagaataaccgaattttgaacatatgtaaattggtaattgaaattatgttcatgaattgtcacaattcttgaatgagttttttggccgtatgctgatcggtaatcaaaacgttggcgtactttcctttcagggcaccgtgaatggccttgcattttctgctgccgcccgccaccagaatcgaacgctctttcattttcaagtcgctgagctcgactccgatcgtcctgccgttaatgctgctgctgcaaatcctgccttcctcgtcaaaaaagcgcgaacaaatatcgccgactccgcgtgctttcagcaattgtttctcttcttcccggaaatagccgagtctgaaaagcagcgcctcatcccggacggttccaaccgtaaacagggcgatattggcttgtctgcccatttcaatgatccgcttaatatgtctgtcccgctcgaccatctgtttcacatcggcgctgtcaaatataaccggcagcggcaaatacctcggcatcgtctgaaatgcttcggcgaacagctgaatcgtttctgacgagtacgtattaacattggaatgactgatgccgcctttcagctgcacgacttcaacgctctttacctgcttcggctccatgcggcttgcgatctggtacatcgtcgtcccccagcttacgccgagtatatcgccgtcctttacggttttatgcatatagtctgcgccatagcggcttaagtaatgtgtaatggcctggtaatcgtcgcttggagaaaagacgacgtgcgcctcaagcagcccgtatttttcttccagcttcgcgccgagttcgtccagatcctcaaacgggtccatgacgcgaatttgaacataccctttttcctttgcgtactgaagcagccttgaaacggtggggcgtgacagatcaagccgttcggcgatctgctgctggctgtaatctgattgataatatagttttgccgcttctatgctgagctgctgtttttcacgatccatgtcgcgcctcccctctccgcttatcatatcaccaaaacacgcggtaaaaaagcaccctctgatggggtgcctattttttcagcacaagctcctgaatcgcatgcgccacgccgtgttcgttatttgatttcgtttcaaaatcagctatctcccttacttccgggatggcattggccattgccacaccgcagccggcccactgaatcatggacatgtcgttgccgttatcgccgattgccatgacgtctttctgttcaatgccgagtttttcggccagcagcttgactgcgtttcctttactgactttcgggtgaagaatctcatggaagaatggcgcgcttttgaccattgtgtatgtttccttgaatgattccggaatggaagcgatcgctttctccagcttgtccggatcgtcaatgaacatgactttcggaatcagaatatccttcggcacttcatcgatcgtgcggaaatgaagcggcactttcgtaatgtatgattcgtataccgtgtattcactgatatcccggttcggcgtgtacagattggctgtgtcaaagtaatgcatcggagtatccagctgtaagctcagctcgtaaagcgacttcaaatcctcataacctaatgactgctcggccacgacaccgtttgtatacgtattttgtacgagtgcgccgttataggcaatcacaaagtcgccttcttcctgtaagttcagctcttccaaataccgacgcacgccgccgatcggccggcccgtgcacaggacgatattgaccccttccgctttggcggcatcaagcgccccgcggacttcagccgtcacttcatgatgatcgtttaatagtgttccgtccatatctattgcgattaacttgtacatcctgcatctcctttgtatccttttctacttatgctttcatcatatcgttttttcgtttcaatgaaaaatcaaacggacaagtttctccgccttctcttcgtaaaccgggcctgcctccggatgcggggccgtcttttccccttgtcagcttgttcgccgccgtcatctgttttctgcttcaagagcatcagccccgccgcaaagaaagggatggccgctatgtccagaagggcaagctttattcccatcgctgcgggaaagtatgcccataatgaacggctgttccgcctgatcatgatataagaaacgatttccagcaggataaacagagcgttcacccacatgtaaatgagcagcgccgcaaacagaaacagcaggagcgtattccgcagcgtgccggaaaacagaagagcgcgcatcatatcaaagaatgaaaaagactgcatgcttccgtttacgacattgggattgtaaatggtaaaacgcccgaactgatcaaaaagcataaaaaataaccataacagtgaaaaccattgaatgatatgtacgatgacacccgtcaaaacgagtctgtcggcagccttatttctcatgtgcatcctccccgccggtttttattcttgtcattgtctttgtttctccgtatatcttccaaatgagcgtatcgttttttcctcttttcaacgtgcttttgacggggtgcggatgtccgaggtattcaatctcgatcgtcccgtccgtgttttgtgagatcaccttgtacacatctgagggcatggcaacctcgccgcggccttgaatgacctgctttgtcagcacgctgtctttcgtaaacgtgacggtttcagatctgaccccgtccatcgggcccggtttcagccccgcatcccatgtcccgtaataaaaagggggttcgtctgctttcttttgcgagcagcctgttatcatgacgcatccgaaaacaagaaccgtcatgatgaaaatccgtatgttccgcaacatgatcaccttcctttgaagcttttttacgcctgtaacttaggcggatgccgtggcactgtgcaattgactacatagtgtataaagacttcactagataaggagaatgatgaatgaacccatatcagtactacaccccgcctgcctatttccctcagcagcaggaatacgaagtgaaccgcgttgagtatgagccgtatcagcagcaggaaagctattattatgcgccccctcagtccgaagagcggcagccgacaggtttagaacggagagtcgcccagcttgaaagacaaaacgccgagcaaacgagagagctcacccgcctctcacaagaagaccagcgccaaaaccgggaaatcacgcgtatgaatgagcagatcagacggctgagccagtccattgaaatccatacccgccgcttaaaccgtttgaatcagcgcctgcgcgcagtcgaaaacagactcaatattccttttcacgctacagaaggcggcttctgagaaaaagggccggaatacaaagctcgacaggccatcccgagccttgtattccgctctgtacataacaggtaaatatttgaatccttttcttgcatgaatgcctctcctattctttcacatgataaatgtgtaaaatcaatcactccaggaggtcttcatgatgtatcaaaaccaatacagcggaaatcagctgcagcaatgccgccaaacagcacagcagcttattcagcagacacagcaaagcagtcagcagtacaagcaaatgctccagcaggaacagcaaaacattcaaatgcttcagcagatgcttaaccatgaacagcatgccgttcataccattcagcaagcgctgcaggggcatgaagcggccattcaaaaatgccagcaaatcgtgaatgtgtgcaatcagcttcagcaggaagtaagcggacacatgcctgcaccgatggcaaacgctaatgtttcttcattcccgcaaacacagcatcacacaccgtttcagcagcattcataccagcaataggccggtcatgcaaatgacaaagcgcgagataccggctttgtcatttgtttttatctctgttttgtcagatcaatgcgatgagcgggttgtccgccgaattttgcttccgcctcatgccttaccgcttcatacgctcttgcttcgacgttttgtttaaacacatcaagctgtatcaaataagccgcccgcactttcagcccgtgaatgatggagatgacccataaaggcagcacgatatacacgcccggcgtgctcggcagcacaaaagcaattgctaaaataataaaataataagtccgtatttcagccattttttgttcttagcccggtagccgatatagaaaaaggccaagaaagcggtcagcgcaaacggcgcaaaagtcagcagcagccaccagctgtgcagcacttcccaccaagtccctcttttcgtaatcaacattcattcctcttcctttactactataacatggataatcaaggaaggttttctataaaaaacatagacggaatgacgtcttcctgctatattaataatgataatcattatcactgaaatagggggatcattatgaagaaacaatcatggctgatcggcctggcacttctgcttgttttcgcattaagcgcttgcagcggcgcgaaggaaaacaacggatcggcatcaggcaaaggaaagacagacatgcgtacatatgaatcaacaaaaggaaatattgacatacccgcacatccgaaacggatcgtcactgacttttatgcaggtgagctgctgtccgttgacgcaaatgtcgtcggggcgggctcatgggctttcaaaaatccgtttatcaaaaaacagctgaaaaacaccacggacatcggcaatcccgtcaatgtggagaaagtgatgcagctgaagcctgatttaatcgtgctgatgaaggatgaccaatacgagaaactatcgaaaatcgcaccgacgattgtcattccttttaacaccgcaaagaatacgaaagatacggtcagcctattcggcgacattgccggggcgaaggataaagccaaaagctttatggcagacttcaacaaaaaagccgaagcgaatcaaaagcgcctcaaaaacgtgatcggcaaagacgagacagtcggcctttatgaaacgacggataaaggcgaaatctggattttcaatgacaattccggccgcggcggccaagccgtttataacgcgctcggattgaaagcgccggccaaaattgaaaaagacatcatgaaaacgggcgccatgaaacaggtttcccaagaggtcatccctcaatatgcggctgattatatgttcattaccgattacaatccgaatggagaaagcaaaacatttgagcgtctgaaagattcatccgtttggaaaaatctcgatgccgtaaaaaacaatcgtgtctttatcaacgatttcaacaccttctatccttatgacccgattgccgtcagcaaacagatggatatcatcaccgacatgctgatcaaacgggctgaagaaaataaaaaataaaaaaagcggcacagtcatgacactgtgccgtttttcctgttcactttaattttgactgtacggagcccggcatatcttcaaacctgacttcttcccaggtctcgacatactttcctttcgccttcaccttcaaatacgcgttcttccgaaggtctttcgcggcgtaaaaggtcacttcttcttttttcccggatgcgttgtatccgtctaatgtatactcagtaccgcccgggctaagatgtttgccatctcgattaatctgtacatagacatcttgctggtgaataaacggattaaatctgtctgtaacatcgttatgaaaaaagagaagtccgtatatgacggcagcggccgccaagacggccaggattgccaatgcttttttcatctgcgcactccccttacttgttcatttttttcaaatagcttgaccgcactgtgaggaagaacagaagctgaaaaatgaaaaaccctccgatagtgaaactgagcggccccgctacatcggaatagccttccacggccaatgttctcaaggcaaacagcgtatgcatgacggcaatgacgaaaggaaagaaaaagagaatcgccaattgtatcgtcacgctttgtgccatttcacgctcactcaggccgattttagccagtgaacggtagcgctcccggtcctcatctaaatcagtgaacagcctgaaatataagaaacttgctgccgcgacaaagaatacaattgcgataaacaggccgataaataaactcaggctcggcagctgcaccgtatcatagtacgtcccggcttttgccataaaatcagaatgcacgtcgatatagttgccgtaaatctcatttttcaaggattggctgatcccaagactgtctttccaatgatcatagctgtagccgtataatgacgctttttcaccgagtgatttaagctgatcaaaggtttgatcgttcaccgcaatgacggcatttaatgaaatcagcggtttttcgacttcttttaccgtcagtttttggtcagacggcttgcctttttggttcagcagcttcagctgatccggcgcttcgtttttgaaattgcggtcatacgtgcccgggaaatagacagcctcatcatgtttcaggccgttcagcttgacatggaagtatgttgacacatccgatttgctgatcatgtaaacagggggaacagtttctccttcctgatagcggacataggaaacatttattttgtctttcttatacgtaaagccgtgtgttttcagttcatggtcaatttttttcaaatgagtctgttcttttgggttgccgctgtaagataaatactccatctcataagcggactcttccgccccgacagtcgatttgtacatcgcgagcacgcccgtcgccgtaaacgctaccgcggaaataatgctgacgataaagaacaggcgggcgttgtcttttaatcgatagacaaggtcagaaacccaaatgacatttttcccgcgcagataaaaggttttccacttcttcagcgcgcgcagaatccagatgctgctttggctgaaaaagaaatacgtgccgatgacggtaagcagtaaaatgataaacggttgagtcccatggacattgccttttaaaaccatgccgtacccgccgcacaggcaggcgatgccgaatatagacagaagcacggacggcttcggctccggcttgatcttgtcagtgccctttattaatttgatcaccgtatttgatctgacaaaaaggatcgtgaactgcgataaaaggaaaaataagagcagaaatccgccggccgtaatgccgagcgctttccaaggcatgtacagaggcagcgcgtccatttctaaaatataagcgccgaccgtaaagaacgttttcgaaaaaatgaagcctccgataatccccgctgcgatcgacatgacgccgatgatcatgttttccgccgtaatgagctttctcagctgcaccggcgtaataccctgcatcagcaggatgccgaattctttatttctcgatttcaaaaatgcgttaaccgaatacagaacaaataagaaagaaaaaacaaagatcatccattccgcggcggttaagccttttctggcgatgttattcaggtagccttcctttagtgccggatgaaacaggaacatcgcaaaggtaaagaaaatcaaaacggaaaaagcgctgcttaaaaagaaagcaagataggcccttttgtttctcgtgacgtttttataagcgaactgaagaaaggtcatttgcgtttccccccagcatagacagcacatcaagaatctgctcataaaagacttggcggttttccccgcggtaaatctcattaaacagttcgccgtcttttataaagatgacgcggcggcagtagcttgccgcaaccggatcatgggtcaccatcaaagccgtgacatgatcatcctggttcaggctctgcatcgtttccatgacgtcttttgacgctttggaatcaaggtttcccgtcggttcatcggccagaatgagtgacggcttatgaatgaccgctcttgcgatggcggcccgctggcgctgtccgccggatacttcaaacgtccgtttgttgagcaggtcttcgattccgagctttgccgcgatgccgtgcagtttttcttccatgacagacggcgcttctttttcaagcgttaacggcagcatgatattttcaccgatcgtcagcgtgtccagaaggttgaaatcctgaaacacaaacccgagctgcttgcggcggaaatgagcgagctttgtccgcttcagccggtgcgggttttctccgtgaatcaggatatcgcctgaatccggccggtcgatcgttgaaatgatattcaaaagcgttgtttttccggagccggacggtcccatcaccgccgtgaacccgccttcttctattgaaaacgaaatttgttttaaagcttgataggacacttgtcctttataggttttatttatatgtttgacttcaagcatattcgccatgaaaatcctccttatggttttattcttgttggtctgggctgctttcatgtagtgccggggcatttaacataaaaatccccttgacataaatccatgttatcaaggggaaacaaaacgagctatgttgttttcttaacgcagccttacatttttgtaagaaatgaaaatcggaccgatgtcccttcaccgggggacgagctgatgtccaccgtatgattgagcttgcccgtaatttctttgacgagatgaaggccgattcccgtagattcttggaaacgccgtccgttttcgccggtgtaataagggtcaaacacccgcttgatatcttgcgagggtatgccgacaccgtaatctttgacttcaagcaccgtcctgtcttcatcgcggaagacattcagctccagtctgtcactcttgcctgccgaatacttgaccgcatttgtgaccacttggccgatcgcaaatttgagccatttggcatcggtgtaaatctgatgatcatcgcgaatatccattttcggatagacccggtattgaataaaaaatcgtttatagctttgaatgactgattggagaagctctgataaagaaaccgcttcaactttaaaatcccgctcaaacaggtcaagccttgaagaataaagaagcgtctcaagcccgaattcaatctgccggacctcttttttgatttgttcaaagacgggctcatcctcttcctgaatgattaaattaatgaccgacagcggcgtttttacttggtgcacccattggttcatatacgtcacccgcgcgtcaagcttggcttcggtctcatggagcttctggtgctgcatccggatcagctccatctgcttttcatacagctctgaacaaaacactgaagaaccgagatacgggatgtccgtcccttcctgctccgagctgagccaatgatacacaccgcggtctttgtaccagcgataggcaagatatcccgccaaaataagaagctgcacgcccaatatgtaaaacaggtgggaaaaagaatgaagacccgcaaaccagtaataaaagaaaacaaacagcccttgaaggagaaaaagcagaatcagcacggcatgagaccggagaaacagcttcatgacagccccctcagctggtagccttcgccccgcaccgattcaatggaaacaggcgcattcagctcccgcagtttttttctgagccgcgtgatatacacgttaagtgtattatcatcgacgaaaatgtcggtgtcccacgtcttttccatgagccggtctcttcccgtcaccttttctccccgctcgagcagcacttccaaaagcttgctttcttttttagaaagctcgcttttttcgtcctgaaagcgcagttcaaaccgttccacaaagagctgcacaccggcatattcaaccactttctctccctgcttggcggcgtactctccgtatgccctgcggatctggcttttgattttcgccagcacaatatcataagaaaacggtttttcgatataatcatctccgccgttttcaatcgccattacctgatccatttccccgcttctggctgagatgaaaatgatcgggcttgtagaatgctggcggatctggcggcaccaataatagccgtcataagacggcagattgatatcaagcagcaccacatcaggcttttcccgcaaaaaaacatcaagaacagccgtgaaatccgcagcggccacggtttgatatccgtatttttcaaggtaattctgcaatagtccgcgaatgtcttcactgtcttccacaatcatgattttattcatgcaaccatcctccaaaaggatacggcttttcggagccctcattatttgatgcccccatcataatgctttcatcggttctctgcaacatgagaaagcgggcctttataaaagacccgcttctccctttctcaatgtaagatcgattatttctaattgacattgttatacttagatggcggactcggaaaggtaattttaaatcttgtgccaattcccggctgactatatatatcaatatttcccccatgtgccttgataatttgttgagcaatagccattcctaatccagtccctgagttatttgacgaagcgcttgtccctctgaaataccgatcaaataaacattcaaccgtctcttcgtccattcctattccatcgtcttctattataatttgtatttcattgtcatgtaacacgtcatgatataatatgacctttattttagtgcccggaggattatgtttaatacaattagcaatcaagttttcaactgcgcgctttaggtacctttcatccatattaaaaagtatcttattgtgactggattctatagcgaatctcttattttctgactccggtagcaacttcattttttctaaagtgtcatgaattactttcactacgtttttttcttcaagatggattggaagcgactcatttttcaattgaaaagttaagttgaaatcttcaatcagcttttccatatattcgacacgttcttccattattaaggaaaaatcacgcacttgctgattttcccactcatattcatttgaagataaaagaaccgtatatcccttaataaccgaaagaggggtttttaaatcatgtgagacaccggccatccactcttctcttgttttttccaacaactctctctcagccttattcctttgaagcgttgaggtaagttcagacagagcttgcattaattcttgataggtcttatatccagatttattatgtctatatttgcttgaatgaaacttccaatcataaggttcttcatatttttctttagacaaattctcaatccaagatacaataaacagcaggggagcacctagtttttttccgtaaaatattgcaattacaatcccttccataataatagaaactatccacaagttattcacccaatagaaaaaagggttatttttttccatcggttttccccatacccatgttaaatcctgattgtttttcgtttcataccacgtagataattgataaccttttttggcaggatacatgtaatctgatattaactctccaagaatataatgcttaggtatatttttaggtttattaaaagaaaaaacctcatctccttgttcatctaaaatttgaatccacattcggttctctaataaatcttcttttgctttcgtatttattgaaaattgtttatctgcaacaactgtttggtcaacaattttttttaaggataagtgcggcgtttccattttattctgacctaagacgaggatgaaaaatatgatactgcccacaatgagcagaccccaaataaacatgagtaaaaaaagtctcgatacgaagtaaaatgctatcctatttctcagcttcaaaataaatcctcatctataggctctgcttcaaatatatagccctgtcctcgaaccgttttaatccatcttggtctgctcgggtcttcctctaatttttcacgtaatcgtcttacatgtaccattacagtactatctccgccataaaactccccccacacatctttataaatttggtgtttacttaaaatttgattgggatgttcacagaaataaatcagaagtttcatttcctgagcagggcaatcgattcttgtcccgttaacaacaagtctgccggtattgggatctattttaaaatattcataatcgtatacctgttttagagggtaagaagaagagagttgagtcattctctttaattgggcttttacacgagctacaatttctagtggattaaatggtttagtaatatagtcatcccccccaaaactaaacccttgcaatttatctaaatctgttgtttttgccgttaagaagagtatcggcacatttgtatgggagcgtattttgctgcataaggtgaagccatcagtgtccggaagcatgacatctaataaaataatatttggaagttcctgatcgattttcagaagggtttcgctccctgtcatagctgtggaaatattgctgaaaccttccttttcaaagcaagttattaataagtttaagatatgttcgtcatcatccaccatgaggattttgttctcttctaacgtcataagttaccctcctttttatttcttattttatatgagatcaatgacataaaggtcagaaaaggaaagaatttaactttcgttaagggttcagaatattcttttaaattttcgaccttgatattcaggtatcaatataactacatacagaaaataaaccagggatgtcgttaagtgaatgtttaggaagagtttcgtttgtgtttaaagaacatcgcttatgataaaagtgaggtgagagacaaatgaatgatcaaatagtggtaacacacaatctaactaaaaagtataaaaagcatacttcagttgatggattaaacttaaggattaggcgcggcgaaatttatggttttcttggaccgaatggtgctggtaaaacaacaaccatccgaatgttattaggtttaattaaaccaacaaaaggaagcatcgaaatctttggccaaaacctaaacaagaatcgtttgcagatattgcaaagaatcgggtcactggtagaatctccaacttattatggtaatttaacagcttacgaaaacttagaagctgttaggaggttacgaggacttccggaacaacgagtcaatgaagtattggaaactgtaaggttatctaaagtagcaaatcgactgactaaggagtattcccttggaatgaaacaacgtttgggaattgcagttgccctgttaagcagtcctgatttattaattctggatgaaccgacaaacggtttagatccatccggtatccaagaaataagagagctaattaaagaattgcctaaatcgggaatgagtgttattgtatccagccacttattgagtgaaatagatcaaatggctactcaagtggggattattaacaatggaaggatgattttccaggactcgattgcaagtttacatcaaaaacgaaaaccactattaaaagtcggtgttagtgacgtaatcgaagcaaaaacaatactaaacaggaaaggattaaaggttgatttacaaaaaaatgatttgtggctgtctcaaacagaaccggaatttgtttcagaaatcaattccatacttcttcattcagggctgtctgtatttcgacttgaagaaaagacacgatcgcttgaggatatttttttagaattaactggtacagagggaagtctatgaaaaagttattatgggcagatcaattaaaactgaaacgttcgtcgttattgattgtagtcttattggttcccttactcattatagcatatgagttggtaaatcttacttatcgatctgaatacgtggaaaaacaagctgaaatgttccatgctggatcaatgtggatgtatttactgtatgataacagtttgttatttggtctgggttttccattagccgcaacactttctgcgtcaataatagcaaatatagaacatcaagcaaacggatggaagcaaaccctttcttttcccgtatctagaatgcgaatttatgtaagtaaatttatttgcttagtagtcagtttatttatttcgtcaacaatcttcttgctcggcatggtactgctaggcaaactggtaggattcgaaggtagtgtaccttggggacttttgtttggagatagttacagcatgttagttacagtactgcctataatggcattccagatatggttatctatggtgtttagcaaccaagcattctcaattcttgtaggatcaatatcatctataatgggtttgtttttggcagctgctcaatcaacgagatggtttccgctggcttatcctagtcaatcttcgacagtcattctgcagtatgaaggtataggatataacccagatctttcatcttacctttgcattagccttttcttagggataattatattatttctaggctctattcattttgctaaacgggatgctttgtaaaaaggaggcgaaatacttgaaaaacattttatttgtagaacgtttaaagcttaagcgatcaaagttatggatcatctatttattagggcctttgttaggtgtatccctggcatacacgaactttattaaaaactataacctttttatgaatcctggagacaatccctgggtagaggcttggacacaagttgccttatttatgggcccttttgtattgcctatcgtagtgggaattttcgccgcccttgtttgcaggggggaacatgtaggaggcggttggaaacagcttctagccttaccagtcaaacactcagatatctttctgggaaagtttctaacagtggtccgcatgatattcattagtatgttcattttaatcctcttatttattggattcggttatatgttaggcataagcgggagtcttcctttacttacaattctaggttatggaattagagggatcttagcttgtttaccattaattttattgcagcttattgtttcaattaggtctaaaacatttggcataccactcgctgttagcattgtttttacattaccggccattattattgccagtacaccattaggtcaagtatatccatggacacagcctatgttagcaatgtcacccgaagatgaatcaccgattcaatcaaacttcctattttactcaattatggtaataacatgtctcggtctcctggtttacggaataagaaattttactaaacgagaccttacgtagggtatatgcggtacttatgagaattcgagacaaggtaataatgaaatcactgcgaaagacaaagatacatgacttatggatttttttaacaaaagaaagaaagttaccgacgtcatcgataaagaaaaggataataacgaattctagttttcataactatagtaaacgagggggcaagctgtaacaaatcgcttggattgaaagagcctgtaaagatgaacaggttgatttgattgtgatactttggtgaaacgcgagaaggacataaacggaaagacgaaagcactcacgatgttgtgagtgcttttcatcagccgacctgctgttttacagctttaccggctgatccgaactctctcattttgcttcgtactgtctcttccacggcttcaatgccgggtgtcatgtagccgcgcggttcgtacagatcaccgtttttctgaaacatgcggcgtgtttcttctgtccaggcgaccatacattccgtgttgatattgattttcgcgtggccgagcgtgatggcttttttgatctgttcctgcggaatcccggatgctccgtgaagaacgagaggaatatcagtcatgcgggagatagcctccatttctttaaatccgagattcggttcaccttgatatttgccgtggacggagccgagggcggcggccagcgcgtcgatattggtttctttgacgatccgctcacattcggcgacatcggcatagcggaccccgccgaccagcccgtcttccatgccgccgaccgtgccgacttctgcttctactgagacgccgtgcttagcggcataatcggcgacttcttttgtcatcgcgatgttctcatcaatcggatgatgggagccgtcaatcatcactgagctgaatccggcgtcaatggcctgtctgcagcgttccgcactgctcccgtgatcaagatggagcacgacgggaacggtaatcgccatttcttccattaacgcgccgaccatggcggaaatcgttttaaatccgcctaaatagtcgaccagacgatcggaagccgcggcgatgaccggcgattgctccttttgcgccgcttgcagaatcgccttcgtccattggaggccgttgatattaaattggccgactgcataatgctcccgtttcgcttctgcaagaagatgtttcatggtgacaaaagccatgttcacgcctccttcatgaagtattttgatacgacggcttccgttgtttcctttgccgttttgatcgtttcctccgcagtcagcttataatattcaggtctgaacagctctacggagacaacatcattgaatccgatttcttttaacgctgacagatgggcgtctaagtcaatcgcaccctgtccaggccagacgcggtcttcatctgttaaaaagccgatcggaaagtcttctgtatcgtcgatatgatagatgaaaattttctttccgtccgcctgcttcaagctctcaatattggagcccatcgcgtggaaatggaagctgtcaaacaccagtccgacattatcgcggccgacagcgttcacgatgtcatacgcctgttcaaatgtattgaccgtgcattgcgggtggccgacaaattcaagggcaatgtttacgccgtacggctccgcgatgtccgaaagctcagtcagcacctctatgctgctctttttgatctcttctttcaaaattttccgctctgtcacaagcggcacggccaccacatatttcacgccgagcgtcctgcaggtttccatcatgcttttgaattccgaaatgatctccctatagcccttctcatcacggttgttgaagaaaaccagtgcgttcagggcaagcggtttaatgtgatgggttcgaaaatattccgccagatcggccagtgaatggtcttttaagtattccggcagcttatccattgtgcggatttcaatataatcatagccgtgcttttcgcacagttctaaatcctgtttcaggtttgaattctccagcgtagtcgcttcattaaagcaaagtttcatgtcagcctctcccatccaacgttttcgatatgaagggagtccggcaggagggcttgtttgccccgctccgccgaactccgtactcagcttatgccatgcctaattcttcctttaatttcttaagcgtggtccggcttgattcatccgctctttcgccgacccaagcaaaaacggcgttcgtcgcaattccgtcgaatttcatctctctcatctttctgaaaatcgtctcaaaatcaacctcgccttgcccgatgtccaaatgctggtgaaccgttactttcgcgtcaggcgggttgacgatgtagcgcaggccatgcgccgctttatgattaaaagtatctgcaaataaaacatgtgtgaggcggtcgccggcttcatcaaacatggtcgcaatatcgccttttccgtcatcatagaagaacgtatgcgcagtcgagtagacaagattgatccaatccttgtcaagcgcgcggatcatatccatcgcacctttgtgcgtttcgataaaatcgtatgggtgagcctgcagattgagtttaacgccttctttttcaaagatgggcagcagttcatccatggatttgataaatttttcttcacttgtcaacggatcatattttgaaccgctgaattcactgttcatcaaatccacttcaagttcaaccgcaatttcgatcgcccgtttccagttgcgcacggcggcctgacggcggtcttcatcaggacccgcccagtggtaaagcggaagaagagaagacagcttcacacctgtatcttttaaaaggcgcttcaattgtttgatttttgctgaatcgactttcggatatttatagaaaggacaaaaatcctcgcgcggagacagttcgatatattcgtatccgagttccgccgttttatagaccatttcttctaacgttaaatcatcgcggtacatggatggatctaaggccagtttcatttctttcactcccgatctattatttgttcacagtcgtaaatgattggtagaatgccggtttctcttgcagcgccacaggctctttctgtccggattcctgagcttttacgcacgcgtcagttgtcaccgcggcaatataaccgtcccatgccgtcggaccgctgacttcacctttattccggatcgaatcaatgaagtcttgaatttccacatcatacgcagccacaaatcggcgcttccagtccatcaggatatcggtgctgaatttcccttcttttctcaagctgatgcttgacggttccggaagcttgataacgccgtcttccccgacgatttcacattgaatgtcgtagccgtatttacagttcacgtagatttcggcattgatgacgatgccgccttttgtttcgatgatgaccatctgcggatctttcagatgcggcagcgcattttttgatttcttcggatagatcacctgtacggattcatagtcgtcattgacgagccagtggaggacatcaatttcatgaacgagcgtatcgacgacggccatgtccgttgaataattcgatgcgactgtcgggttgcggtgcgcacagtgaatcatcagcggctcgccgaccacgcggttgtcaatcgcttctttcagctgaacgtaaccgctgtcatacctgcgcatgaaacctacctgcaccaatcgttttcccgtcttcatttcttcctcgacaatgcgcatacagccttctgccgttgtcgcaagcggcttttcacaaaacacgtgcttgccgtgctgaatcgctttcaaaacgctggactcgtgagccgggccccagcttgtcactaagacggcatccacgttttcagcagcgaggaggctgtcgtcatcaggataaacggaggcgttcaaattgaaatcctgaacggtctgctgcgcggcctcctgattcacatctgtgacagcggtaatttccgctccggacagcttatttgtgatgcggttgatgtgctcttttccgatagcaccggttccgataacacctatacgtaaattcattgatcgccactccttctgataatcaaataatggttctcgtctttcttttctcgctgccgtcctgaggagcgccgtacagttcctcctgtatttgttcaagcgacttgccggacgtattcggtgcgaaaacaagcccgatgatcatactggccgtcacacatatgagcagaataccggccataaaaccgatgccgaattgtgacatgatgaccggcacaaataaactccaaattccgattgaaatacggacgagaaagaacatgagcccttgtgctgacgctctgtgttctgtcgggaacagctcgcttgcccacagctggtagttcgcctgctggccggctccgttattgatgccgatcgctaaaacaaacaaaagcagcatcgggagcccctgaaacggcagtaaaaacagcgaccagccgacaacggccatacatgcgcagattccgaacaccgttttccgatatttatctgcaaaaggcatgaagatacaggcgacgccgagcccggtgaagataaacagggccatctgcagaatgttggccgtatttgcggatacgccgccgacctgctggtagatgtacggcatgaagaatcccatgacgcccgcggcgagattccatacgagaaacacacccattaaaaacaaaatgttcttgaaaaatttcggctgaagcaggtcaaaataagatgtttttttcacggcggcaggccgctcttcactgtttttccaggcatccgactcaggtaaacgctttcttatcacatatgtgatcagggcgatcaccaatagatgcgcaaagacaattttatttcctaaaagcccgaggtcaccgaccaaaacggataacagcagaaccacaacggctcctgcggcccacgccacctgcgccactccgcaatgcctcgcccggtttttctcaggggcgttttccgcgataatggtccatgaagccgtaatatccgcgcctacagaaatcccgataatcatgtatccgcataacagcatgggaaagttgaatccaaacaaaaccaaacaaattcctaaggcgtagacgagcatactgtttgtgtatacagcttttcggccgaccttatcagccaaatacccgccgagcagcgctccgatggccgctgatatcgcgtttgcgctgaaggcgccgagcaatccgatctggctgtcggacagcttcaagtagctgacccacatagataaacccgctgatcctgccacgatggaacctgcatcaatgtaatttgctaatgctgcggcgatggtccttttgctgaaagctgattccgccttggcactattcatataagtccccctctaatttgcaggatcaagcagttcactgtcgatgtactttcttgcaatcagcgcgtactcaagcggattggcgactgccgggtcttgttcggcttcgatgacgatccagcctgaataatcatgacggacgagcgttcggtatacttcggtaaaatcgatgcatccgtcgccgggaaccgtaaaaatgccctgtaaaaacgactgcctgaatgacttgccttcctgtctgcaccgctccataatgtcaaaccgggcgtccttgaaatgaacgtgtctgatccgatccatatgcttgttgagaatcgtcatatagtctccgtccgagatataggcatggccggtatcataaagtaaatggacataccgcgggtccgttccatccatcagccggtcaacttcttccgccgtctggacgcctgtgccgagatgatgatgaaacgtgaggtccagcccgtattcgccagcgattttcccgagacggttcaagccttggcacagcgtatcccattcttcatctgagaagtgcggtttttccttaaatacatcaatgtccaagccctgaacgctgtacgtctgttcagaaacgatggcgacatccgctccgactttctgcaaataatcacagtgttctgtaaattgttcagccgttttttcaataccgtcttgtacgataaagctgctgaaccatttccccgcaatccgcaagttccggagagccagctctttattgaggacggagggttcagggaaaaaccctcccacttccgtaccttgaaagccggcgacaacaatatcgcttaacaaatgctgcagcgtattcccggctccgatttccggcatatcgtcattgcgccacccaatgggagcgatgccccacagaatatcttgtttgcccatcgtgatgcctcccctctagtactgcttcgcagacttcagcttcatctctttcgcttcgtatgcccgctgaacgctttcctgctccgacacttccgccacgccgacatgccaccagctgtcatagccgtccgtcatcgttttcggcagaaccttcatttcaattaaagtggatacgtcttgcgttttcgcatcttcaagcgccgctttcagttcttcaaccgtattggctctgtatgttttagcgccgtagccctctgccaccttcgcgtaatcaacgtttaaaatctgattgtcctctgtgcggaactcgcaaaaataactgccgctcccgtgatccatctgcaggttgttaatacagccgaatcccgagttgtcaaaaagcaggacattgatttttttgttatattgaagcgcggtaatcagctctgagtgcagcatcagaaagcttccgtcgccgacgagtgaatagacttctttgtcgggatgggccagcttgaggccgagcgtgcctgatacttcataccccatgcaggaatagccgtactcgaggtggtacgtattcgggacattggaatgccacagccgctgcagatcccccggaagagatcccgccgaactgatgacgacgctatcttcaggaatcgtgtcattgatggtcaacagcgccgttgtctgcggcagctcagtcccgagcgcgtcggcatactcgtttaacacatcctgtgagaaatggttttttatttccggtttgaacgcgtcacgtgtaaaagtgaccttgccgagccggtcccgttcagccagccattcatctttccagtctttaatcgccgtgccgaatgcacttttatatccgtctaataagccgtgcagcctgccgagcgtcactttcgcatcggctacgacctgaaacgcgtcaagcttgtaagcctgcatgcggctgacgttgatattcaaaaattttgctttgtcaaaatcaaacgccgttttcgaggatgtcgcaaagtccgtgtaccgtgtgccgacaccgatgatcagatcagcctggcgggcggctttgtttgcggcgagggtgcccgtgatgcccatgccgcccagattgttggcgaaatcggcttcaaccgttgacttgccggcctgcgtttcgacaagcggaatgccgtatgtttcagaaagcgcgattaattcctcacgcgcgccggagtacttcgcgccgccgcccactaaaatgacgggacggctgctctgcttaattctttccgcggcgcctttcagttcacgctcgctcggctgcatccggtcaatgtaatgaacgcgtttttcaaagaagctttcatcaaaatcaaatgcttctccctctacatcctgagaaatgcagatggtcgccgggcccgcttttgccggatctgtcatcacttcaaacgcccggattaagctgctcatcagctgctcgggtcgggtaatgcggtcccaatagcgggacacgggctttaacgcatcgtttgtcgtgacggcggcactgtattcctgctccacctgctgaagcaccgggtcaggctgcctcgtcgcaaaggtatcggccggaagcagcagcaccgggatatgattggccagcgccgtacccgcggcagccgtcaagttagcggcacccggaccgaccgatgtcgataccgcgtaaatttttcttctcagcatctgcttgctgtatgccatcgcggcatgcgccatgccttgttcgtttttgccttgatagactttcaggtgcccggcgtcctgctcaagcgcctgcccgatccccaacacatttccgtggccgaaaatcgtgaagatgccctcaacgaacggctcttcttttccgtcaacatgaatgtactgccggttcaagaattgaatcagcgcttgtgctgtcgttaagcgaattgtcttacccacaaacgatcccaccttttatacgttctatttaccgttaagactgtgctgcgcttcaatcagttcgatgatttcaccggcagccggcattgcttctgaggagctgtgtttgctgacgacgatggaagcggaagcgctcccgtattttaaagccgtttcaatatcccggccgctgacaagtccgtagatgaaggcggacgcataggaatcacccgctccgaaggtcttcagcacctttgttttataggcatgcgcccggaaaacttctcccgatctgctgtatgcgtatgatccgtcaacgccgtgcttaatgacgacaaggtcagcggagtgcgcaaacaaatggcggacggtttcatcgttatttccgccgctgcggttttccattacgtcaaattcgtcacgcgtaccgatgacgatatcggattgttccgccaccagcgtgtagtacacggctgtttcttctgccgattgccatgtatacggacggtagtcgagctcaaacacgacttttacgtcatgtttttttgcgatatgcaccgcttttaagacggcttcgcgcgacgggcttttcgcaagcgccgtacctgatacgagcagcattttcgcgtttgcgatgtagccttcattgacttcggacggctcaagatacaaatccgccacgtcatcccggtacatcaggatgctgcactcttcgggactgagaatttccgtaaaagcgagcccggctttgcgcccttctctgtcaacggtcatttgtgacgtatcaacgccctttccctgcatataagaaacgatgaatctgccgtgctgatcgtccgggattttgccgataaaaccggcttttaatccgagcttggcgctgccgatcgcaatatttgccggggagccgccgacatatttagaaaacgtcatcgtttcttccatcggccggttgtattccgccgcgttcaaatcaatacacgcgcgtccgatcgcgacaatatcaaactctttttcttcattaaatgtatatttcatcgttatctgccactcctcacttgttagcgttccaggatccattcatgggccggatcattatgaaacttccattttcgtgtcggtcccgccattacattcaggtagtaagaggtatacccgtccggaacaccaaccgggtgatagcccgccggcacgatgacaacgttttcattttctgcggtcatcgtctcatcgatcgagcggtcgtccgtgtacacacgctggaagacaaacccctgcggcgggtacgtttcatggtaataggtttcttctaaaaaggattcagccggcagattgtcttggtcatgtttatgaggcggatagctcgaccagttgccgctgtccgtgtaaacttcaacaacgagaaggctgtttgccgatggatctgaatcggggagaatattatgaacggttcgtttgtttgccagcttgccgcgatgttccacaccgttgtcttccgctttaatcagctttgtcggaagctggtgttcggacggagaatagcacagcgcgaccctcgccccgctgaccgctgtgatttcaaaagagcggtcattggacacataaacgctgtccgtcggttttctttcaaatacgctttcacgggtgccgatgctttcaaatgtctgatcataatcagtgacggtgatttttcccgttaccgcaacgatgcagcactccgtctttttcaaatcttctgtatatgcggaaccgggagtgaggtcaacgactttaaatccgacgtatttgaggtctgaattggctgaagtgacgtcatgtatgatgttcacgccttgagaaatctcatcggcctgcggtttgcgcagcaaatgactcatgtttattcctccttaatggatggtaaaagaaaacccggacggaatcacaaagccgtcagggccggctgtcagatcaattgaagtcaggagacgggtatcgtgccgtcacgacttttttacgtgtatagaagtcgacgctgtcctttccgtttgcgtgcaatgtgccgaagaaagaagacttccagccagagaacgggaagaatgccatcggcgccggcacgccaaggttgatgccgagcattcccgcgtcaatattctcacggaagtagcggatcgcattcgcatttgaagtgaacagacacgcgccgttcgcaaattcagactggttggcgatgtccaccgcttcttttaagtttttcacgcggatgaccgacagaacgggcgcaaagatttcatctttccagatcgtcatatccgtcgtcacgttgtcaaaaatcgtcggtccgacgaaatagccgtcttccgttgcgttttcacgcccgtcacaaagaagtctcgctccttcttcgatgcctttttcaatatagctgtgcgtgcgttttttgttgtcctcgcggatgaccgggcctaagaacacgccgtcatccagtccgtttccgatcttgatgtccgctgctttttcctgtaatttcgccataaactcatcggcgattccctcttcaaccgtcacaaccgcgcatgccatgcagcgctctcctgccgaaccgaatgccgcaccgataatgtttgtcaccgtatcttcaaggtgggcgtcatttaacacgatcgtatggtttttcgcgcccgttaacgcttgcacgcgtttcaaatgttcgctgccttttttgaaaacatactcgccgacaggttttgaaccgacgaatgagatggctttaatctccggatgttcaagaacgccgtttacgacgtcatgcgcgccgtgcacgacattgaagacgcccttcggaaggccggcctgttcaaacagctctgccagtttttccgttaacagcggcgtgcgctcagacggcttcagaatgaacgtgtttcctaacgaaatcgccatcgggaacatccagcacgggaccatcatcgggaagttgaacggtgcgataccgccgaccaccccgatcggatagcggtaattcgccgcctctacatccgtcgcaatagaggcaagtgaatcgcccatcatgagtgacggcgcgcccgctgcgaattcgacgttttcaattccgcgtcccacttcaccgagtgcctccgtcgtgtttttaccgttttccaaagtaatcagacgggcaagctcttctttgttctgctggagaagctgctgatagttaaatagaattctcgcacggcgcggcactgccgtctttgaccatgtttgaaacgcctctgacgctgagcggacggcgtattccacatcctcccgcgtagaaatcggaacctggcacatcacttcttttgtagccggattgataacgtcttcatattgatctgtcttactttcaacccattcaccattgatgtagtttttcagttttctgatctctgccattctcattgcctccttaaatagtaaacatcctgttcagctggataataacggatgaatatattcatcttttacatataaaagacatgaattaaacgcttacaaatgctaaaatgatggtgactcccaatttttccatgtaaaagttggtcatgtaccggaaaaagcaaacggttacatctttcacttttgattttacaggttatgttttggtcatttcttggttacattgtaagcccaacacctcttcaagtcaatctaaaaaatcaaaattttttcattatttttatcatactttttttgatcgggaaaacaggaacttggagaaccgtgtcgaatcggaggggatgatccctcttttttatcatttgttaagtaactattgattaacttctggtgtttattatatattttaattactttaagaattctagaaggagtttttttatgaaactgatgcggattcaggagatggaagaatacattctcaaacacggagccacttcgctggatgagctgtgtgaggtattcaacgtctctaaaaacacggtcagacgcgatattaataagcttgcggaaaaaggggttatcaaaaaggtatacggcggcgtgacgtcagccgaaaaatctgtgctcgtcccttttgaaaaccgcaccattcaacatcaggatgaaaaaatcaaaatcgcccgctatgcgtcacggtttatcgaggatcacgatcttgtatttattgattccggcacgacgaccaaatcgatgctggagacgcttgatcccgataagaatgtaacggttttgacgaacagccttgatattattaacgccgcttcatccatgaaaaatatcgacctgatcatcatcggcaataactacaaacggaagacaaggtcgtttgtcggcattgatgatccgagcacactcaataaatacaacattaacaaggcgttcatgtccgctaccgggacaacgatcacccacggcctgacgaattccgacttactggaatacgaggtgaaaaagagaatttccgaaaaggcgaacgaagtgtatttgctcgcggatcattccaaattcggcaaatccacgcttttgacatacgcgcctttcgaccggcttcacagcattgtcacttctcagcagctcgatgaggaatatacgaagtattgccaagagcatcaaatcgacattcacttggcatagcgttatagttaatagagaacgctgccgtatttttccggcagtcgctatgatatccaattttttcagggggcgaaaacatgagcaaagtaacaatcggcaaaactgacctaaaggtatttccgatcggtttgggaacaaatgcggtcggcggacacaatctctatccgaatctgaatgaagaaacgggaaaagaattggttcgggaagcgattaaaagcggcgttaccatgttagataccgcctatatttacggtgtgggccgttctgaagaattaatcggcgaggtgctgaaagaatgtaaccgcgaggatgtcttcatcgccacaaaagccgctcacagaaaagaaggcgatgactttgttttcgacaattcaccggcctttttgaaacaatcggtcgaagacagcctgaaacgcctgcagactgattacatcgatttattctacatccatttcccggatgagcacacgccgaaggacgaagccgttcaagcgttgaatgagctgaaaaaagaaggaaaaatccgttccatcggcgtatccaatttctctttggaacagctgaaagaagccaataaagacggcttagtcgacgtgattcaaggagaatacaacctgctgaaccgtgaggcggaaaagactttcttcccttatacgacagaacacggcatctcattcattccgtacttcccgctcgtatccggactgctggccggcaaatacgacgagaacacaaccttccctgaaggcgacctgcgcaatgaccaggcgcatttccaaggggagcagtttaaagagaacatcaaaaaagtcaaccagctcaaaccgattgccgaaaagcacaatgccgatacggcgcatatcgtgcttgcctggtacttggcgagacctgaaatcgatatcctgattccgggcgccaaacgcgcggatcaattaaaagacaacatgaaagcagcctccattacgctatctgctgaagaaatcgcgtttatcgacaagctgttttcctaagaaaaaaacacgcctcttaaaggggcgtgttttttttatgtttatatttttctcttcggggaatgaaatagttatctaaataaactattatgcgttccaaaagatgaggaggatcatctgtgaagaaaaacaccaaaaaatacctgatttactttttcggagcattaggcgggctgctttacggctatgacaccggtgtgatttcaggggctttgttatttattaacaatgatattcctttaaacacgctgaccgagggattggtcgtcagcatgctgctgctcggtgcgattttcgggtccgcattaagcgggacatgctctgaccgatggggccggagaaaagtggttttcgtcctttcactcatttttattatcggcgcgcttgcctgtgcggcttcgcaaaccgtcaccatgctgattatctcccgtgtcattctcgggttagccgtcggcggctcaacggcgcttgttcccgtttatctatctgagatggcgccgacaaaaatacgcggaacgctcggcacattgaataacttaatgattgtaaccggaattttactcgcatatatcgtgaattacatattcaccccgtttgaagcatggcgctggatggtcggtctcgccgcagtaccggcggcgcttttattaatcggaatcgcgtttatgccggaatctccgagatggctcgtcaaacgcggccgtgagcaggaagccagacaagtcatggaaatgacccacgacaaagaggatatcgccgttgaattagcggaaatgaaacaaggagaagccgagaaaaaagaatctacgctcggcttgctgaaagccaaatggatccgccctatgctgctgatcgggatcggcctcgccatcttccagcaggcggtcggtattaacacggtgatttactatgcgccgaccatctttacaaaggcaggactcggcacttcggcgtccgttctcggcacgatgggcatcggtgtcttaaacgtcatcatgtgtatcaccgccatgatcttaatcgaccggatcggccggaaaaaactgctgatgtggggaagtgtcggcattaccttgagcctggcgtcactatcagccattctccttctggccggcctgtcagcttcaacagcatggctgaccgtgctgtttctcggcatctatatcgtcttctaccaggcgacatggggtcccgtcgtatgggttctgatgccggagctgttcccgtcaaacgcacgcggagccgcaaccggatttacgacattgatcctgtcggcaaccaacctgatcgtttcactggtattcccgcttatgctgagcgccatgggcatcggctgggtattcggaatattctcagtcatttgcctctcatccttcttcttcgccgcttacatcgttcctgaaacgaagggcagaagtttagaagaaatcgaaacgcacttgaaaaaacggttctccttaaagaagcgcagcaaacaaaatcaaattcttaaacagcgcacactgtaacaaaaaaaggaatcgcccccgctgggcgattcctttttggcgtcataccataactttgcaaatgtcattcgtaaattcgaccggatcatggatcggcagcccttcaatcagaagcgcctgattgtagagaagatttgtgtataatgccagcttttcccgatcttgtccgtgcgcgttctttaacgtctcaaacacttcgtgattcgggttgatttccagcactttttccgctttgacctgctggctgtcaggcatagcattcaacactttttccatttcgatcgtcacttcgccgtctgtcgcaaagcataccggatgggattttaaacgtttcgatgctctgacgttctttactttatccgcaagaatctctttcatgctttcgaacaggtctttatattcgttttcttcggcttcggtctgcttttcatcctcatcactgtcgatgcctaagtcggcgctagatacggacttgaattctttttcctcatagcttgtcagcattttgatcgcgaattcatcaatgtcttccgtgaaatataaaatttcgtagcctttgtccgccaccatttcagtttgcggcagcttttcaatccgctcatatgaatcgccggacgcgtaatagatatatttttgatcctcaggcattctggacacatattcgtccagagtgacgagctttttctccttagatgaatagaagagaagcagatcttttaatacgtctttattcgcgccgaaatcattatagacgccgaatttcagctgtctgccgaaagattcatagaaagattcgtatttttctcttttgttcttcagcaggctcttgagctcggctttgatttttttattgatgtttttcgcaatcagcttcagctggcggtcgtgctgcagcatctctctggaaatgttcagcgacagatcctcagaatccaccatgccttttacaaagctgaaatggtccggaagcaggtcggcacatttgttcatgatcagcacgccgttggaatacagctccaatcctttttcgaattccttcgtataatagtcaaacggcatgttttccggaataaacaaaatcgaattgtagcgcaccgctccatcgacgctgatatgcacatgggtcagcggtttatcaaaaccgtaatgcttctcggcgtaaaaagcctcgtaatcttcatccgtcagctcgcttttattttttctccagatcggcaccatgctgttgaccgtctgttcttcctgaacttcttcaaattcgttctcgctgccctctttcggcttgttgaccgtctcttccattttgatcgggtagcggataaaatcagagtactttttcacgatcgctttgatgcggtagttttctaaaaactcatcatagctttcatcttccgtgttttcttttatttgcagggtgatttccgtaccgacggtttccttgtcacacggcgcgatcgtgtagccggcagccccttccgactcccatacatacgcctcgtcactgccgagcgccttacttttcaccgtgactttatcagccaccataaacgccgcataaaatccgacgccgaactggccgataatgtcatggccgtctttcgtgtcattttcttgcttgaaagcgagtgaaccgcttttcgcaatcgtgccgagatgctgttcaagctcgtcttttgtcatcccgataccggtgtctgtgacggtgagcgttctcgcttctttgtccgccgtcacttttatgtagtaattgtcttgatcaaacgttaatgaatcatcggttaacgccttgtaatagattttgtcaatcgcatcgctcgcgttggaaattaactcgcggagaaaaatttccttctgcgtgtaaatggagttaatcatcatgtccagcaatcgcttggattctgctttaaacttttttttccgcacttcagatctctcctttaattatgctttgatgttatgtaaaatcttttcagcatctatttatcatatacagtgacaattgtcaactaggattagcagatgcatatattgtaaatttaacatgttaatggattcatttcacccattttatcaataaaaaagagagaatgttgatcatcctctcctctctgcttctttccggcggccgaattccttcttcatccatatgtatgacgggtagaaaaacaaactaaataagataagagatcccaagtttcgcaaagactcatgcagaacatttcttacagtgagaggaaatatgatgtcctgaaatagaatagagataacggtgtaaatcacaaatcccataggaacaatggcataacaataaaacgctatctccttcttatgctgtatcttcaaaatatgtaaacctcccaatgatgtatatacataatattaacatatttaataggtatttagaaacagacctccgtatgtttatccccctattcagcgggaacagatataaaaaaaggaggaatcgcaatatgggaagattaacagacaaaaccgcaatcatcacaggggccgcgacaggcatcggacaagcgacggcacgggttttcgccgatgaaggcgcccgcgtgatctgcggtgacatcaatgaaagcgaactgaatgaaaccgtcagcgccatcagaaaaaacggcggagaagcagaagcctttcaccttgatgtatcagacgaagaaaacgtaaagtcttttgcggacggcattcagcaaaagtacggaacaattgatattctgtttaacaatgccggtgttgaccaagagggcggaaaagttcatgaatacccggtcgacctgtttgaccggatcatcgccgtcgatctgcgcggcacatttctttgcagcaaatacctgattccgctcatgctcgaaaaaggaggctccatcatcaacacctcctccatgtccggccgggccgcagaccttgaccgctcaggctataacgccgcaaaaggcggaatcacgaacctgacgagagcgatggccattgattacgccagaagcggaatccgcgtcaattccttatcgccggggacgattgaaacaccgctcattgataaattggcaggcacgacagaagacgaaatgggcgaagcgttccgtgaagccaacaaatggatcacgccgctcggccggctcggaaaaccggaagaaatggcagccgtcgcgctcttcctcgcttcagacgacagctcttacgtcacgggagaagacatcaccgcagacggcggcatcatggcatacacttggccgggaaaaatgctgattgataagaagtggaaggaagagacggagtgacggcgaaaaagaaacaagccagtgcaaaaacactggctgaacaagctgagggcgggttacttaaaccagcccttttcctttgatcgggtaatggcttcaattcgatttttcacttctaatttatccaggatcatcgaaacgtaattgcggactgtgccgcttttgatgctgagggcgtttgcgatttctttcgtgttttttccgtctgcgacaagctcgagcacctctttttcccgttcggtcagcgggttttcttcactatagatgtcctccattaattcaggtgcgtagacgcgtcttcctttcatgacgctgcggatggcgctgacgagctcatcgctcgggctgtccttgagcatgtacccgctgacgcctgcttttagcgcccgctgaaaatagccggagcgggcaaaggtcgtcaaaatgatgattttcacaccgctgtccttgagctcttctgccgcttcaagacctgatttcccgggcatttcgatatccatcagacagatgtcgggcgcatgtttttccacgaaatcgatggcatcctggccgcttgtgccttggccgacaaccgtcatatcctcttctaaattcaacagtgaaccgagtgcgccgagcagcatttgctgatcctcggcaatgaagatgttgatcatctgctaccatccttttcttttgattttgaatcattcgggattctcatggtcagctttgttccggcggctgtatcgatggctaaactgccgtttgcgaattcaagacgttccctcattccaagcaggccgtgcccctttgaaaaaaagcggtcttctttgcattgaaagctgccgtcatcttccaccgtaatgacaacctctttccaaagctgctgaatggtgatgcggcatactttggcgccgctatgtttcacgacattggtgacggcttcttttatgcacatgctgacgatgttttcgttcagcagagagatatgttttggcgcttctttttcttcatacacaaattcaattcctgccgcttcaagaatttgccgaacattgccgagctcatccttcaatcggatgcctttcatcgatgagacgatttttctgacctcatttaaggaggtgcgggccgtctgctgcacgcttttcagctcagtgcgggcctgttcagggtccttgtatatcagctttcgggcgaggtcgcttttcagcccgattaaggagagcttttgtccaagtgtatcgtgaaggtcccgggcgatacgctgcctttcttccagcttcacaagatcggcgattcgctcatttgcatattctaatttctcctcaaggcgctcccgtgcttttctgcttcgaatgctgagcgggagcaggatggcactgatcagtgtaatgacgataaacggaatttgtgtcaaaaaccacccttttttcagaacaaggctgaagttgacggcaaccgccgcactaatgatatgaatgtaatataagatgtaaaatggaactttgtctcggatatggccgatgaagtaggcgataaagaaggcgaaataaatataactgaacagcataactgagccggtcgaaatgccgatcagaagaagcgcccataagtaaagcggccagccttttgcaacaaatgcgaagcggtatgcgccaaagaaaacaagtgtgaaaatgatgccggccacgatgacaaaggtagaagagcttttaaaaataaaataaaaaggcaagatgaaaaaaatcatccatatataaggagaaatcccattcagtttttgaaatttaaaatacttcttcatctttgttccaccttctgctgcttgtgtctaccatcactttatcaaaacaccgccttcattgcatcctcacgcatgaagagaaggccctttctgataagagaaagagccgcgcgccatatcaggcatttttctttaaaggttctttcggtaccggatggggcgccggttttttccgcgcctcccgaaaggtgacaaattgcttttcgtcctcatcccacagacggaatttcatggattcaagacttgttttaagcgtaatggtcggtacgttttttaaaggctcgtgcccctcatgagcggcttccagcttgtagttcggcactttcggacttaagtggtggacatgatggtagccgatattgcctgtcagccattgcaaaagcttcggaagcttgtaaaaggagcttccttctaccgcggcctgcacatagtcccaatgctcatcggcttcaaaataagaatcctcaaacgtgtgctgaacataaaagagccagacgccgattgaccccgaaataaggaaaatcggaccttgaacaagcaaaaagttttcccagccgacaagcaggcacgtcgcagcagccaataagacaatcgccgcgttcgtgaaataggtgttccagcgctccttgcggcgggcgccttttacattgaaacggttttgaatcagaaatacgtaaatcggtccgagaataaacataataaacggattgcgataaagtctgtagcgtacttttgtccaagctgacgcttcgttgtattccttgacggtcatcatccaaatatcgccggtgccccgtttatctaagttgctgcttgtcgcatgatgaatggagtggctacgctgccattgaaggaacggaaacagtgtcagcacacctgaaataaacccgaacagccggttcagcttcttttgtttgaaaaaggattggtggcagcagtcgtggaaaataataaagattcttgtcaaaaatcccgctgctataacagtaaaggcgagggtcagaagataggagacattgaggctgaagtaagcaagaaaccaaagggcaaaaaacggcacaaacgtgttgaaaagctgattgacactatgctttgtatcggcaccggaaaatgcagcaacctgcttttttaaagatgcttgtttttgagttgcggcgtgattggtcatgaatgtcatatccccttttttttattatgattccaagtataccgaggcgctcgcggcggttgtagtagcagccatcatgccccgaatatgacatttgtcatgtttggcggcagaatgctgatcaggcggcatatggaaggtatcttttttacgagggataaagccggacacttcatatcggcacttaaaaacagcaaaaaagaacccggcctgttttcggctgagttctttttcatcatcctcacagcaaaatcacccgatacttctttacatccaaaaactgcagaaactcccgggccagcatgtccggcgcgtggtcttttccttcatgaagacgatattgaatcaagccggcgagcatggacgcgacataatatgcatagagttttttgcccgcctgaatgtgcaggggctgatgaagataaaacgattgcagcgctctgaacatttccggaatgacgtcaggcactccggagccctctctcagaaaatggacgagcggcaggccttccgacagtgccgaaaagagacggacgagcgcggcttccgcttcttccatggagcaatcggcaggctctccttttaccgtcaataatccgatcagatcccggcatgattgatggatgatcgttttcagcaatgcttctttgttggcataatggtcataaaaagtggcgcggcggaggttgctttgacgggcaatatcggaaatcgtaatcgccgcgtactcttttttttctgccattaagccgatcatggcttcttgcaaggcctgcctcgtccttgtcacccggcggtcggcgggctttttttcttcttgttccggcatccggcggccaaacagccagtaaaaccgtttttgagaaatcaaatcccacacctgtccgctgatcgcttccggggatgccccgggctcctcattcagccagtacaacacaatggcatacgtgtataaagcgcggtaatgaatgtacatatcctgttcagtcggtgagaaatccgcattgaccggtgacagcagcacatcatgccggaacacatcttttaaaaaagcatgaaagtgaaaatagggcattttattgcggtccatcatcgtttgaaaaaacacccgatgccgatcaacaaaagacagggtcggatgcactttttgccatccgccatgtaaatgaagcacatctttattcttcagcgaatcatacagcgcttcgctcagcccgtctttcatttcttcctctatatcctctaaaatcgcatatttatcttcgtaataaaggtacagtgtcccccggctcacatgcgcccgttcggcgatgtccttcatggtcacacggcggatatcccgctctccaagcatggccaaaagcgcttgtttgatgtcagttgtcacagaatccggcataagagacactccttccattagacagatcaccgcaatttgtacggtaacgtatagatgtgtttacgctgtctttgccgcaaaaacacatcacattataataggccctgaagaaacaaaaaagcaaccagaggaggaagaccgatggatcagcatataaaagcagacatcaaacgcgtctttgagcttcagaaaaaaaatcaaaaaacgctgcgtgcttcaacagccgggcagcgcagagaaaagcttcagcgctttttagatgccgtcaccgcacatgaagaagaaatcatcgaggcgatcagacgggacgtccgcaagccttatcatgaggtgaaaagagcggaaacgcagggaacgatcaaggcgattaaagataatatgaacaatctcgacacctggatggcgccgaaacgcgtcggctcatccgtcagccccgacgctgacggcgtattaatgtatgagccaaaaggcgtcaccttaattctcggcccatggaattatccgtttatgctgacgatggctccgcttgcggctgccattgcggccggcaacagcgcgattgtgaagctgtccgattttacgatggagacgagccatatcgccgcgacagttattcgcgaggcatttcacgaagaagaagtcgccatttttgaaggtgaggtcgatgtcgccacagaactgctcgaccagccgtttgaccacattttcttcaccggaagcacgaatgtcggtaaaatcgtcatgacggcagcggcgaagcacttgtcgtccgtcacgcttgagcttggcggaaaaagcccgacgatcatcgacagcggctatgatttgatggacgcggcgaaaaaaatcgccgtcggcaaatttgtcaatgcggggcaaacatgtatcgcacctgactatctccttatgaagaaagaagtgcagagcacctttacagatctcctgcaaaccattgtcaatgcaggttttatggaggatgatcatacggttgaccgcaacaaattcacgcagattgtcaacgaccgcaactttaaccgtgtcaaagtcctgtatgatgacgccattgaaaaaggggcgaaaacggcgttcggcggcgtattcgatgcgcatgaccgcacgatttctccgaccgtgctgacaaacgtgacgcctgatatgaagatcatgcaggaagaaatcttcgcaccgattctgccgattatgaattacgaagatatcagtgaagccgttgattacatcactgaacgggacaagccgcttgccttgtatgtattcagccataatcaggagctgatcgattatgttctgcagcatacgacatccggcaatgcttctgtcaatgatgtcgtcgttcatttcactgacgtcaaccttccgttcggcggtgtcaatacgagcgggatcggttcatatcacggtgtgtacggctttaaagaattttctcatgaaaaaggcgtatttattcaagcctctaaataaaaaaagaatccgcgcagatgacgcggattcttttttattatttttttgccccgaatgcgagcagtttcgtataagtgccgacatagagcgtgccgtcttcagccagaaccggggaggaaatgacattgctgtctgtttgatagcgccatttttcattaccgtcagcttcaaccgcatagacatttttatcgtcagaaccgaagtacacattgccgtccgcatcaatcagcggcgccgttctcacaggcccgtccgtatagaaagaccagttcatattgccggttttgctgatggaaaacagctcgccgcttccggaaccgatatacacattgccgttatggtcgatcgctaatgaagagctggagaaaccgtttaacgggaacgtccactttacagcacccgttgatgtataggcgtataaattgccgtcctggtttccggcgtaaacggtgccgtctctatcaataaccggatagcctttaaacccgttggacgtcgtttttgaccatttcacttggcctgttccggaattgatcgcgtaaaagatattattgtacgttgccgtatacagcgtgccgtttgacgctaacacgggagcggagccgaccacgccgtttgttttaaacttccacttttgcgtccatgtcgaaggcgacgtcggtttaatcgcatagatatagttatccagcgtcgacacatacagcgtgccgtcagagccgatagccgcatcggaactaggcgctccgctcagcggaaccgatgttaaaatgtttccggtttctttgtcgatgaaatatagttttttatcgtgagaaggaagataaatgacaccgtttgttccgagcaccggagtcagcgtataggtcgtcccgaggttttccgtcacccatttcacagtaccgtccggatgatacgccgtcagcttcccgtcttttgattgaataaatacggtgccgtccccatcaaccgcggcccccgcaccgttttgaggattggccggaacattcttttcccattttaacgcgccatcggcagtgcttgtaaaccggctttctctcgaccagttgaacatcgtcggagacatcgcctgcgcgtcataccgtcccgccaagaaaccggatgccgcatgattttgtttaaataccgtttccgcggcttgagcagccgccggatgcagccattttgcccccggcagatcagtaaccgctcccacagataaagccgcagcaaccgcagcgccggccgccaatgttttcattcgcaatgaagctgtcttttttttcaatgtcagttcctcccgtttctattaaaagctgctatatcacttcgataataccataattaacctatgaaatatttgtattttcggtagatttatagaacaaatgtcacatagcctgctgatgcttcggggatgatcgaaacgcggcaatataccacaccacattgacgatgaaagccgcgcctgaccaaacgaaaaggccgtaataaagagacagctcctgccctaaggaaattgcggtcaataacgccaccaacaagacagccgcgcaaatgataagcccgattccgcaaaaaacggccatgatgattttcatgacacgaataccgagaatatacaaaatgagcgggaccgcatatataacaaagatctggccgacggcggcccacatgcccgcggaattaaaacgattcgcgttcggccccgtttccgcaagcggagaaagcgagacgaggaccggcaataaacaaaacagcagagcggaaagcaaggtcaccgcaaccgcaccttttttcttttgattcatgtgaatatcctcctgacaataacccggcttttttaccggtaatctgataatatgttatattttagcacgatttttacttaatttgagaatgttttgccaaaaacgaatttacaaatccagaaaaatagatataataaacgttatggaaccgatattgattcataaagcgctatctaacaaaacacgaagtgatattatgacgtggcttaaacacccggaagaccattttgatgaaagaccttatcttgagcagggactcagtttccgcaccggaatttgcgtcggtgatattcaggcaaagtcggggcttgcgcagtccgtcatctccagctacctgctgaccatgcaaaaagccggcctgctggaatccgaacgaatcggaaagtggacctattacagaaggaatgaaaaacaaattaaagcctttgctgactatgttcagcaccagctataaccatgaaaggagggcttttttcgttctaacatatctacttttctgtatatgtagttataaaaggaggcatacataacaatgaaaaaaagcagttccatcttcattctgtttttggcactaggggttttcgggattatcacgaccgaaatgggcattatcggcgttcttccgcaagtggcggacagatttcatatttctgcttcaaaagcggggtggcttgtcagtattttcgcgttcatcgtcgctgtgtcgggaccgtttttgaccttgcttgcttcaggcataaaccggaaagtcattctgcttttggcggtgctgatgtttgccgtttcaaatgcggtctacgcgtatacggcgcatttcagtgtcatgctggcgtttcggatcattccggctttatgccacccggtgttcttttctgtagcgcttgcggccgctgcccggcttgtccccgccggccaatccggaaaagccgtaacgaaagtcttttcaggcatcaccgccggctttgcgttcggcgtgcctttcacgtcttatctggcggatcgtctctcccttgaagccgccttcttattcggcgctatcatcagtctcatcgcattcacgggcattcttctctttttgccatccatgccggtcacagaaaaaatgtctttcagaagccagctcggcatccttcgcaaaccggctttgtggctcaatatcgctgccgtcacctgtctctttgcggccatgttttctgtctacagctattttgcggagtacctcggacgggtgtcccatatgaacggcacatgggtcagctttatgctgatgagcttcggagtgattatgatagccgggaatttcgtcttcggcgctttgttatataaaaatatgaaaaagaccgtcatcctgtttccgcttctttatacagccgcctacttgctcatatacgggtttgggacgtctttcgcgccgatggccgtcctcgtcttcgtatggggcgccgttcattccggcggtctcattgtcagccagacatggcttactgcggaagcaaaggaggcgcccgaattcggcaacagcctgtttgtctctttttccaacctcggcatcaccatcggaacggcggcgggcggctggtttatttcacatttgggaatccatcagctgatgtggtgcggcatcatgtttgcccttctggctttcgggctgatcatgggacgcttggcatggggaaagaggctgctcgcaaaagcttaagctccgttgcaaaatccggaatgattacgtataatattccagattaaagcaagggagagaaaaagatacatggaaagaccggcaggattttggattcggtttctggcttacgtcattgatcaaatcatcataggaattccgatttttatcattcaatttatggtctcttttttatttgcggcaggcgttgcggcggctgaccccttcatgaccgaaaatcagtttaacatctcttttctggtgttcggcgtcatcccgattcttgcgagctcttttgtgatcagtatcttatatttcagcctgctcacggcctcaaagatgcaggggacactgggaaaagcattgctcggccttaaggtcgtcaatgaggatggcggacggatatccatcggccaggccttcggacgcgctttcgcatatatcatatctaagctcattctttatatcggattcatcatgggcgccttcggagagaaaaaaacgctgcacgacatcatgtgcagcacccgtgttgtctataaataatgacctcaagtccgggccttttgagcccgggcttttttatgacggctgtgcccgcctgatgtcaatgccgccctttccgtcagcctcaatgcggatcgtcccgttcacaataacagacagcggatggaactccgcatgctgatcagaaaaaatccagcggcggccgctcggccctaaaagcaaaaacgccccatcattgtaatcacccataaaatgaaacccattttccctaagaggcgcatgctttctcaccggaatgccgaaacgctgcagctccctcccggttgatacgacttcggcagccgtcagattcacctcgccgatattcagaacggactcaatcgaaaaatgttccgcgcttggcggcgatgtttctctcgcgatgaattccgccagattgttggacggatctttgaaataaaaggaacgcgcctgaatatgagagaaatacacctcatcctccccatcttccgtttgaaaaacgactttatccttcatccacgccttcgcctcatcaaaacgattattcggaatgttaaacgcgaaatgatacgtcggatgagagtgagaatcggcgcgcctgaattccaactcactttctcccgccttgatggtaaacgaatcaccggactcatcaattaaaggaaaacctaacatccgttcatagaagtgtttcgtctcctccaacgcacaactgtacaaagtaatgttatttatttgcatgatcataccccctttggttataaagacaatgaatatatcaatattcttgtctgactccgttcaaaaatgattcaatattctcaattcggtaagcagtataggggtgagtggaagctaataaagcgataaaaccttttcgaacgtcaatattttcacgttcaatccgatagaaaaattctaacagctcatctccgaaacccgctttcgcagctacttcatctgcccgatattcaaaatctctgcttccgatattcacaaaataaaatcccaaacggcagtacgttatgtaacaccatccgaccagcctaaagaatatatttaataaccccccagacacagaaggatttgatccgccgttcagaagcccttcaatacaccccagaataaaacatataaagaatcccatcacatacagcggcaacagtgcgatactcaaaatagtaaaactggaattaaacatcacaaggtgtaatgtgtctttaaaagcaagatgcgcatactcatgggccagtaccgcttttagctcaccatcacttaaatttctcatagccgccgaagtcaatcctatcgttttaaaccccagtgcaaatgcattaataccctcatcatctattaaaaaaagatccgcttttttcacatgaggataatgtctttgtacgcttacaaaaacttcatcgtttaacctttcaaggtactccttttctccaatggttgccgggcgccttaacccggcccttattctatttctccagtctccaaaaagtccataattcataaagaataacaatccgtaaatggataaaaaaagaagaaccgttggaaaaagcgccaaaggaaataattttctgaagatcataattgaaatcaaaactgtcagcccagaccaaacaatgtataaataattgaactttgtttttctaacttccatttttgatcacccttttttattatgtttgaatgatttaccactacttaaactgtctttttattatcagtttcgaaaatagcattgtaaagatgatcatccattttttttccgaaaaagaggtgctgtttttaacagcacctctttttaatcactcttcaaagtaatccaggtccactctcttgataacaaaagtattctctaaactaacgccgacattatagttgaacattaaatccgttagcctctctccatcaattaatataatttttttatcgatcactttaacatattcttttgcgccatcagtaaatacagatgtagtaataaacacaccctttttcgcttttttcccatccaggctgcccgcaaatttttgtatttccggccttgaaacagaatctttccacctcttggcttgaagataaatcatatccagccctaaaatgtcttctttgataactccatctatgccgccatctccagatctccctatagccgtgcctgcatctgttaatgaaccgccatatccaagagcaacaagcaattctacgactagtttttcaaaaaaggcaggagaacatttgtatatttggttcagtaactcttctttaatctcatttttaacagcattataattctgttcaatgatttcattgggagttctgggctctgaagtaatcgacggctcactttcctgttgattgctgtctttacccgtctgtttgaatctctgaaagctcttatacttcattagaaatctattatctatactggcgacactcgggtcattaattatttctaagccttcgctggtgatctgaaaaacaccccgtctgacaatgtcgattaaaccggctttacttaaatatgttcttacccaaccgattcgattatgaagtactttttggtttccgctgggtaataatttttctgcatcttcctctgacaggtttaactcttttgctaatttcacgtataagtcttgtaatctgtgctcctttttatctgaaagaatctttaaaaaagggtacataaattcttgatatcctggtatggtcaacttctacactcctatttaacgtctttgttaaaactggcttgatatttatattatttttgcgttcctaacacccctgcgtaaaaccatcttcatttcacacttaaatctctttcaaaaaatcactcatgatgatatatgaggtaaagctaatataagaacatccgctatccataattgaataagttcaaaacaaatatatatctttaaattccagtcaccggactcatcattttttttaaaaacctaacacccattcataaaagtgttcctgaacaaagttactttatttgcatgaccgtcccctctttggtttatactaccatatagagggtggattcttgatattattctgcaccaattgagaatccccctttcgcccggcgctaaacatgacaaacagcgccaaaccgcttataccaggcgtttttaaacatctaaagcaaaaaaagcagaaaataataccccatatagcttgacaaaaaataaatgttatttaataatctatatataattagaattattattgaaagataaagtgaatgctttgtctttttaatatatttcaaatcacatttcaggaggaagatattatgtctttaatcggaaaagaagtactgccattcgaagcaaaagctttcaaaaacggtgaattcatcgatgtaacaaacgaagatttgaaaggtcaatggagcgttttctgcttctacccagcggatttctctttcgtttgcccgactgaacttgaagatcttcaaggacaatacgctgcactgaaagaattaggtgttgaagtatactctgtttctacagatactcacttcgtacacaaaggctggcatgacagctctgaaaaaatcggcaaaatcacttacgcaatgatcggtgacccatctcaaacgatctcccgcaacttcgacgttcttgacgaagaaactggtcttgctgaccgcggaacattcatcatcgatcctgatggcgtgatccaaacagttgaaatcaatgcaggcggtatcggccgtgacgcaagcaacctagtaaacaaagtaaaagcagctcaatacgttcgtcaaaacccaggtgaagtctgcccggctaaatgggaagaaggcggcgaaacacttacacctagccttgatttggtaggtaaaatctaaggagtgcattccattggtacttgatgcaaatatcaaagcacaattaaatcaatacatgcagctaattgagaacgacattgttcttaaagtaagcgccggtgacgatgacacttctaaggacatgctggctctcgttgacgagctggcttccatgtcatctaaaatttcagttgaaaaaactgaattaaacagaacaccgagcttcagcgttaatcgtaccggagaagacacaggcgttacattcgccggtgttcctctcggccacgaatttacatcattagtgctggcattgcttcaagtcagcggcagagcacctaaggctgatcaaaaggtcattgaccagattaagaacatcagcggagaataccgctttgagtcttatatcagcctgacgtgccacaactgccctgatgtcgtccaagcattaaacatgatgagcgtgctcaacccgaatatcactcatacaatgattgacggcgcggcattcaaagaagaagtggaaagcaaaaacatcatggctgttccgactgtattcttaaacggtgaatctttcggaagcggccgtatgaccatcgaagagattctcgcaaaaatgggcagcggcgcagatgcgtctgagtttgccgacaaagagccgtttgacgttcttgttgtcggcggcggacctgccggcgcaagcgcggcgatctacacggcgcgtaaaggcatccgcaccggtgtcgtcgctgaacgcttcggcggccaggtactcgacaccatgagcatcgaaaacttcatcagcgtcaaagcgactgaaggaccgaagctcgctgcaagccttgaagagcacgtgaaagattatgatattgacgtcatgaaccttcagcgcgcgaaacgccttgagaagaaagatctgttcgaacttgaacttgaaaacggcgctgtactgaaaagtaaaacagtgatcctttcaacaggtgcccgctggcgcaatgtcaacgtacctggtgagcaagagttcaaaaacaaaggtgtcgcatactgcccgcactgtgacggaccattgtttgaaggcaaagacgtagccgttatcggcggcggaaactccggaatcgaagcggcgattgaccttgcaggtatcgtcaatcacgtgactgtgctggagttcgcgcctgaactgaaagcagacgaagtcctgcaaaaacgtctttacagcctgccaaacgtcactgtgcacaaaaatgcacaaacgaaagaaatcacaggcgaccaaaacgtaaacggcattacgttcgttgaccgcgaaacaggcgaagaaaaacacgttgaactccaaggtgtattcgtccaaatcggtctcgtgcctaatacagaatggttagacgaaacggtcgaacgcaaccgcatcggcgaaatcatcgttgataagagcggcgcgacaagcgttcccggcctatttgccgcaggggactgcacagacggcccgtacaaccaaatcattatctccatgggatcaggtgcaactgccgctttaggcgcatttgattatttgatccggaattaatgtgaaagccgccatatgaatggcggcttttttacatatactaattaagaaggcagtatttcctctaaacaatcctcgctgattttataagattttggccttctgcttaccagctcaacaaatccttgctgttctaaataatccattactctgttaattttatgtctcgatttatttgagagctccattaaatcttgcaccgacagcgtaacctgatcatttacaaatacattaatcgtgataatgatattaaaaatatcacgttcatctttataatcagcccattgatcgctatcaatatagttcctaattcgtttcagtttcattaaattaaattcaagatcctcaataattcctttttgtcctgacagaagcaactccagcatatccattaaataaaaagtcagctctccccggtttaaaggtgcgggaatttcctctaatgccttataatacttatctttattcttattaactgcgtaagaaaaagtgatggctgaatatttttctaagtatcgggacaaataactcccaacgataaggcgtcctgttcttccattgccgtcataaaaaggatgaatgtattcatagtagtaatgagctgtcatgtaacgatacagctggggatgtgtttcatcatgaagataagcaattaaagcctcaagcgcttctgttatcttctgttcagaattaacgccgatatgggtggtcatgttcccatcgttcacttcaacatagccttttctgaatagctcaccatccggcgcatcttctgttccgatttcatctgcgaccagctcgtcatataattccctaaagtcatgaatgcttgtaaacgacggaattcggtctataaattgatatgttttcatcaatccgacaaaccgcttatgtgagggctcggattgttctaacgctttaagagcctctttcaattctttttttgtactgcggattccttcaatttcattattactctgtgcttcattaataattaatttatcaaaataaggtttgacggcaaattcggggagctgactgataagggatgaaattttggaactgtttaacaacacttcattattcagcttcatgagtttatgtgtattcacataaaatagctcaaatgaatcgtccgtgggtcggccttttcggaacccccgtatgtttaatgatgttgaataactgccatagctgcttgttctctttttaaattctttctcatatgaatcagcatccattttataaaaaagcttagataacttctcatacttcatatcatcacctcgcttaatttaaaattatacacttttttaaattatacaatcattatagcctgatttctaacaaatattctcgctttccaatcaaaacaaaaaacggcatactgcatggcagtacaccgtctgaagcaattcaatctgtctttctccctctcgcccgatagataagaaataatccaataaaccacagcggcgtcagcagcaaagccgggcgcgttgcatccgcaaacagcataatcaccagaatgacggcaaacagcgccagcacggcgtaattgataaacggcgcaaacggcgccttgaaagacgagcttgcatgtaagtccggacgggttttcctgtatctgatatgacagacaagaatcacgccccacacccaaatgaaacaaatcgcgctgatggtggtcacgatgccaaaggccgcttccggtatcaatttgcttaaaagagcgccagctgacagcacaataaccgatatccataatgcgcggctcggcacatgatttttattcagcttcgcaaaacttgcaggcgcctgtttcgttttgcttaagttatacaaaatccggcttgttgaaaacatcccgctgttacaagcagaagcggcagacgttaatacgacaaaattaatgattcccgcggctaacggaatgccgaccagactgaaggtctttacaaaaggactttccgccgcattcagctgcatccacggattaatacataaaagaatgagcaatgccccgacgtagaaaaataaaatccgcaatggaattttattgatagcggacggaatattttttttcgggtttgacgtttccgccgccgacacacccactaattccacaccgacataggcgaagatcaccatctggaacgaaagcaaaaagcctgaaaatccgttcggaaacaagccgccgtgctcccacagattcgccgctgaaaccgttccggtatgcgttttgaacccaatcaccagcagaaccacaccgatgacaattaacgcgagaatcgtgactaccttaattaaggcgaaccaaaactccaattctccaaaaatcttaaccgttaacagattaagccctaataaaatgagcaaacagataagtgccggaatccactgcggaatatcaaaccaatatttcacatacacaccgacggcgatcacatccgccatagccgtcataatccagcaaaaccagtaggtccagccggtgacaaacgctgcacgcggccctaagtacgcctcggcaatatccgttaatgattggtagcctgctttagataacagcagttctcccagcgcccgcatgacgaaaaaaagcgcaatacctacaataaaatacgcaaagatgatagaaggacccgccagctgaatcgccttaccggaccctaaaaacaatccggtgccgatcgtgccgccaatggcgatcagctgcacgtgccgattcgataagtccctctttagctctcgctgctccacatctgactcctccttacctctctagtgaacgacgagcaaaaaaagccaataaaaaaagagattggatgccctccaatctcatggtcataagaatatcaaattatatctgcgccgctgacaatcaacagcatgacaaatacatattcggtactcttctgtccttttgcctgagattgtgaacccttcggcgccgcggaaaacccgcggtctctccagaagccgctcctgctgtagttcgacccacagcaatcatagcctgctacgtattgagtttctgatagaaatacctatcagctaactttttattttaatggaacttgaatgcattgtcaatagagggatgagctgcacggcgttatcccggtccaatttttgatgcctgaagcgccgtattttccgttttcattgtctcaaaaaggcgttatgcggtactatcatataaggtctaatcatttaaacattatgtcatactttaaattcactttatcatacaattgctcgtaaataaaaaggggatggacgagattggaaacgaaatatttagatctgctcgcacaaaaatacgattgtgaagaaaaagtggtcacggaaatcattaatctgaaagcgatactgaacctgccgaaaggaaccgagcatttcgtcagtgatctgcatggggagtatcaggcattccagcacgtgctgcggaacggttcaggaagggtaaaagagaagatccgcgatattttcagcggcgtcatttacgatagagaaattgatgaactggcggctttggtctattatccggaagacaaactgaagctgatcaaacatgactttgatacgaaagaggcattaaacgagtggtataaagaaacgattcaccggatgattaagctcgtttcttattgttcttccaagtacacccgctccaaattgcgcaaagcactgcccgcccaatttgcttatatttctgaagagctgctgtacaaaacagaacaagccgccaacaaagaacaatactattccgaaatcatagaacagatcattgcgctcggccaggccgataagctgatcaccggccttgcctacagcacgcagcgtttggtggtcgaccatctgcatgttgtcggcgatatttatgaccgcggaccgcagccggataagatcatggaagaactgatcaactatcattcagtggatattcaatgggggaatcatgatgttctctggataggcgcttattccggctcaaaagtatgcctggcaaacattatccgcatctgtgcccgctatgacaatctggatattattgaagacgtttacggcatcaatctgagaccgctattgaaccttgccgaaaaatattacgatgataacccgtctttccgcccgaaagcggacgaaaacagaccggaagatgagattaaacaaatcacaaaaattcatcaggcgatcgcgatgatccaattcaagcttgagagcccgattattaagagacggccgaactttaatatggaggaacggctgttactggaaaagattgattatgaccgcaatgaaatcacgctgaacggaaaaacatatcaactggaaaacacctgctttgcgacggtgaatcccaaacagcctgatgagctgttagaagaagaagcagaagtcatggacaagctgctgttctctgttcagaactccgaaaagctgggccgccatatgaattttatgatgaaaaaaggcagcctttatttaaaatataacggcaacctgctgattcacggctgtattcccgtcgatgaaaacggcagcatggaaacgatgatgatagaggataaagcttatgcgggccgagagctgctcgatgtatttgaacggttcttacgggaagcgtttgcccatccggaagaaaccgatgatctggcgacagatatgacttggtacttatggacaggcgaatactcctccctcttcggaaaacgcgccatgacaacctttgagcggtatttcattaaagagaaggaaacgcataaagaaaagaaaaacccgtattactatttgcgtgaagacgaagcagcctgccgaaacatcctgatggaattcggtctcaacccggatcacggccatatcatcaacggccatacaccggtaaaagaaatcgaaggcgaagatccgatcaaggcaaacggaaaaatgatcgtcatcgacggcggcttctccaaagcctaccaatccacaacaggcatcgccggctacacgctcttatacaattcttacggcatgcagctcgtcgcccataaacactttaactccaaggccgaagtgctgagcaccggaaccgacgtcttaacagtgaaacgattagtcgacaaagagctggagcggaagaaagtgaaagaaacaaacgtcggtgaagaactgatgaaagaagtggcgattttggagaagctgcgggagtatcggtatatgaagtgaagaatatggagttcagggatgattctctgggctctttttttacggtttccctgtatgtaaaacggatttaaccgcttcttcaatctccctataacccgtacatctgcaaatattggactccagccaattttttatcgtgtcatcacttgcattcggctcagtattcactaaagcatgacaattcatgagaaaacccggtgtgcaataaccgcattgaaacgcgaatttttcaataaaagccttttgaatcggcgtattgatcagtccttcaattgtcgtaatgtcctttccttccccttctgccgcaagcattaagcaagatttcatcggcaccccgtccgttaataccgtacaggcgccgcaatccccatttaagcagcccggttttgcaccagttaatccgagacgaagacgaagagcaaataacaaagtatcagccggcctgaccgtaatctgtctttcctcgccatttactttcaacgtaataggatcagacatttggacctccttctaattcccgtaaggcatctaaaattgtattttgcaagacaaacattcggtattcacttgagccttctgcatcatcaagaacgggtttgggtacatactgtaaagacctgcgcaccctatcttctaatgaataacttttatcgttaagcacagcctccatttcagcagaacgaaacggaaatggacatacgccgctgaaggccattctgatctcatcatcttttttcagcgcacagactgtcaccaatggatacccgacattccactgctgtcttcttttgatactgacaaatggcaggtcaacgtacgctcgatcgacaacgacatgaaataaaaaatcacctttttgcaactgtatttccttgttaaatactttatttatgggacggtaatgaatccccgctctccctgcaatccctatcaaactatcagaaatcaacaacggcagcacggcctcacggtaatagatgcccccgcaaatgtttccgcccaggctgatcttatttcgagtcgtccgatcggctatttcacttactgttttacttaatagcggaaatggattttcttcctccagtttcgttaatgacacgcccgctccgatcaccagatcattttcataaaagcggatggtttgaaattccggaagctcgttcatatctatcaccgcatccgtatagatgatattcagccttcctaacgtgataatttccgtgccgccggaataatacattggtgttttcttttcggccgcaagcgagtgaaatagattgattgtttcttgaatggtcttcggtttaaaatagtcgaaatcaaacggtatcatctttccacccctcttgcgtcctccataatcgttcgggaatgagaggaagttgattcaattggacacctaaagcggcggaaaggcaatttcccaatgctgccggcatccccaacagtccgtgttccccgcctccgcgcgctccataaggcgcaatcacatgcggggtttcaacaaattctatgatatattcaggctgctctccatagtgaagggggcggtatgttctaagctgaggatttaatactctgccatatgaatcaaatacaaaggtttctcttcctccaaatgcgattcccatactcatcccccccatcacttgacccctagcagctttttcattcagtacagttcctatatccacaacagaataggcttttgtaattcgatacgtataatcccgtttatccaactcaacttcaattccctgagcaccgacagcccactcgggtcccggctttcctcttcccgtttcccggtctaaattcgtcatccgggttaatgtgtaattgccgctcgcaatgatttggccgccaatggtatttccattcggaaacgtatatccgtaagcaatgtcttttatttcaacatgtacagaaggatgatctataaaataaacctttccgtcggccacttccaattcctcgacaggaacccgcaacacacatgatgccacgtccttaagctttcgaatggcttcctccgctgcattcagtacggcatttccggccattaacgtccctctgctccccacggttttccaatgctcgggtgttgtttgtgtatctataagcatttttacatgaattttgcttatatccattttcattcgttccgccaggatttgggctagcactgtttttgtccctgttccaatttccactacccctgacatcaaattaatgcttccatcgggattaaaggttaaaatcaccccggacgttgcatttgtatcaaatgttgaggttttccaaatgcagctgattcccttcgcccgtatcttccggccatcgatttcaattcgctgtccctcggaccaattcattaattccttcaatctctcaatgcatttcggcacatttccgaccgtgcttgaattgagaagaacttgagtcggtgtggtgtcaccggggcgaatggcatttttatagcggagttctaatgggtccatgttcagcttttccgccaatacatccatcgtccgctcaaaggcaaataacacttcagcatggctgtagcccctgaatgcacttggatatggatgattcgtatacatacaatatgaatcacaccgtatatgatcgatcgcgtacggacccgtacaatcaaccaccgcagcccggctgatgtccactcctttatcagaatacgctccgccatcaaataaaaactgaatgtccgccgcctttaagattccatcctttgtagcccctaatttgacaatggcatccaacccgatatgaacgggagatgtgatcagatcctcttctctcgtattaaacaatttgacgggccggcctccgactgcttttgatgccaaataggcaatcacctctaactgaacggctgcttttcccccgtacgctcctcctactaaaggcgttttgacgatcacctttccgggttcgattccaaaataccactgcattaattttttaatggcaaaaggagcttgagaggatgtggtaatgataatctcctcatccgcccgaatttcaacaatcgagcatcttgtttccatcgcagcgtgatcagaagggttaaaggaaatctggaattctgctgtcacatcactttccctaaacccgtcttcagtatttccttttctaaccttatccaagtttgcgatattggtcttcggaaccgggaatacaccttttgtcttctcatagcggtccgcatgttcatggacgagcggcgcatccttttgaaaggcctcacggggggaattgacgacgggaagaggtttataggatactttgatggcatccgcggcctttttagctgtaatcggattttccgcaacaacaaccgcaaccggctcaccatggtatctgacccttttataagcaatcggcgatctgtctttaatttcctcacctgcaagcggaaaaggttcatcacccaatatcgctctcacgccgggaatcttccaagcctctgaaaagtccatagacacaatatcggcatgcgcatatggactgaccagcatttttgcgtgtaatgtgcctgtttcttgaaaatcatccgtatatttcgctttacccgtcactttttcaagagcctcttttcgaatgacactcttcccgatatactccaactcattcactccccgaatttattcagcagcagcgtataatcttcaactgtatcgacgtcataaaaaagcaaagggtcttgaaagctgatcatttttcccatattgatcatactttcacggatgacgtgccgggcgccctgatctccctttaactgatgcaataccggaaaacattgatttgagaataaaatggggggcataggaagatgatgattttcagcggcgataaatgaataacagggctccttttgataggaatcaattaacgtattgatgatatctgcggtgacaaacggctgatctgcaaggagaatgataacggcgtcagcctcatactctgccgctttttgcaaaccgcattgtatagaatggccttggcccttacccgcttgctcacattctgcctgactccacttatttgatatgggatctaaaaagaaaaaatccgaaagccaatgcagtggatctccctttcctgttataacgaaaatatgatctaattcagataacaaggcatttttaagagccatacttccaagggaaactccattgagaactaaacttcgcttatccgtccccatgcgtctgcttgtaccggctgccaggtaaatggctgctgttttcataagcgagacctttgtgttcgcattttttgaatcatctcgccaacaatgcttacagcaatctcctcagggccttgtgccccgatgggaagtccgataggggaatgaatatcttccggaatctcagctccgcctaatagccgttcagtgcgccttctagggcctaatacacctttataaaacacattctcgttttttaatgtatgtaaaatgatctgatctttttgaaagctgtgcgtcataatgacaacaaaatccctttttgtcatgctcaggccttccatgacttcttccggtgctcctgttatcaaatggccggcttcaggaaaatggccgtgatgacataaagcgggacgccagtcaatcaccgtcacatgaaagcccgcatgagctgccaacgaaactaacggcttcgcatcttcccctgctccgaagacatataaacaaggttttggcaccatctgatggataaaaaataaatcagaggtatgttcatccctcttgattcccttttccgtctgtctcagtttttgaatacggccttgttccataacatccccggttccaaacacttcgccgtcttccactatgtacagatcttccttcggctctaacgttttagtgaatcgtttcattcgggtcacagactttttttcatctaagcatgtcttcactgtcatcagatttcgttccaattccccttttacaggctcaagtaaaaccgtcaaaacaccattacagccaatgccctgtccccaggataaatcgtcttccgcgctcatatcaaagcggacaatcaccggctctcctgcagcccagacctgttccgaccgttcaacgaggtcttcttccagacaaccggcggataacattccgactcttgttttatcccctaaaatcaacatcgaagccccttctttcttataagcggacccctctgttttaataatggtagccagtaccttagcttttttagaagtggcgatgacatccaaaatccggtgtatatcatccatttcatgtcccccgttttacctgatcatatctgcatctgtatatccgtattctataattccagaaaacattacaaacgcttcagcaatttcttcgtttctaaaaaaaaagagtctttatagaccttatgaccgggcggcggatgcgacagcatgtcggaacggagagattccaataacacgctctgttccttctgtttccaattgtctgtttcaccctgttgtatgcctttaaagcccgcaaagtattcacttaacacttgtaaatcattgcccagctcccttttgtcacttgaagataaagctccttctttttcccattcttttaacgttttcactatatttgataaatactcaaatccggcgttcaacttttgcatctctatttgatagcttgaaatgatgattttatgtttttttctgacggggttgaattttaagctgtcagaggctgtttgcagcatctcttttgtcatatgcagctcttgcagaagattgttcattttatacgccatgaggttcccttttccttgtccccactctgattgcacccatttggaaaggtctgaaagtgtgccggaaagctgacgagccaatgtttgaaaagagtccgctgccttttttgtgtagtccggcggaaaaaggaacatgtgaaccagaatggcgatgatgacaccgatcaccgtatcgatgattcggtcgaatgcataatctttagcgtttcgttcaaacgtaaagaccaacaaaatggtgagcgctacctgatgtaaaaccgttacatctattcgcaaccacttggcaatgtaagtaccgcctaataggaacagccccagcatccagccattcattggcaagtgactgacaagaaaggatgttagcatgatcccaatcgcagttcccgcaatacgatgaaaagaaaagcgaattgactgatctatcgttggctgcaaacataagataacagatagaggcgctaaataggggtgatcagagcccgccagttttgccgcttcccaagaaacagcagatgcaatcgccatcttccaaaccaaagatgttttgttttgaatttttttactcttcatcatatccccctcctttcagaaaccttttccactaggtttccgtgacgcaaagggatttatactgtcgtatggaaaatgtgaaagaagctgtgattcaaggggggaattcttgaatgacagcttctttttggggttggggaacattgggaaatgacgcattattttcatgggcagcatttgatatttcagtccaatacagacctaccggaatacgatttagtagtagttagaggttcagaggtgattctctgggctctttttatggtttttttaacaaatcaagtctaattaattacttaatacttgaaaccgaataacgcgcctgaaccatcttcattttgttcaagttcacatacaatatcttgactatttaacttgtctttggaaacatctgaatctattaaactaatgatatattgtacatcattatctttgcaatattcttcaataaattcaagataagatcccttgcgattctcatgcaaagcttcaaaaggtccatcgtgatatagaaacttaaagaaacttttattagagtaataacttaaaatagctagatcaaaacacatacacagcattttccgatatgaaaagccctcatcttcatgtgtcaaggtaccactgtctgttatgataccagcattaaactctacattagatgtagtattagtggaaatatcaattattccattcttgctcgttataacttcaaaataagtcttaaataagaatcttatatcatttaaaaccttatttccgttttctatttttgactcaattgtttcattaattttttcaagtttcttttgcttttcatttatatctttaatatctgttcttgtctgtaaaatgatttctttttgtgtttcaagactctggatgctcttttctttttcaattaaattagttctcaaatttttatacttatttataacatcactatcttgtaatatattcaagatatctgatcgttgtttacctaagtcctttagctttccttcgactaacttaagttctgcttttttatcattaagaagatttgatagatgaactcttctatcttcaagtaaagacttattaaatctaactagttcttcatatgatttttctaattgctcactaaaataaatttctacttcttcaaaaagctcttttatgtaatcgaaattaagaaactcttttgtccctaaagaattttcaataagctcaatgtcagatcttaatttataagccttattttgtaaagaaatcgatttgttttctatctctttaattaattcattactaatctgtttttcatttaaataaaaattaaatgagtcaagatcctcttccaacaattctttttctctggtaagaatatctatttgcccattaattctatcaatatcagagggactataatagtcttccatattttttatctttgttttcaaagcttctatttcatgattcagtttatacttttttaagagtaattcactatcgaatcctagtaattcatacacaaagggtttccatacttggtctttagaacttgagaactttttcaattgaaaaacatcaccataatcattttgagttctaataaaatagcctactagttttcgataatcataatcacataatatattaaagtttaatttctcatttaagattgctgttgctgaaacgacattttcacttgtagtattgagaaccaagtttgtgtaatcccattcatcacaatctattaatactgttgaatagtcgagtattttcatgtctactcttgttatgttcccaaaagatcttctaattgttaaataattgttattgttcaattttaattccagataaaatgtatggcgcttaaagacctttttcttgttataaaaatagtttcccttttttacttccttcagcaacatgaaatctattagatggataagcgcacttttaccaaggttgtggggatcatttgcatttttatcattcacataaccaaaaatgatatttaatccatttttaaattcaatatctttaaatcttgaatcatcgcaatatagtcttgataatttcatattttcatctccaagacatcagattcgatatcatagtttattcttcctatcaagaataaaaaatctactgccggtaaaaacaaatataaggcatcatcaccaatttgcttctctaatgcattataaagctttctataactgcatttgtggtcattttctttgaacagctctattaataaagctaccacatatattaagcttctgtttaattccgtaaatttatccggtctcagcattactaccaccgttttccccgatgtgacatatgtaatacatgaaatgtattatcacactcaccaattcctcattctctaatatctcaatatcattagaatttaaaaatctatcaataatatcattaattacttcgctgaaaaattccttttctctttttatttcaggtatttttctattaatggttttcttaatattattgtaggacttctttaattttttattacgaggatctgataatatatctttaatagttttgaaataaatgctactttcaattatgatattgttgtaatcattacaaccttcttcttccaaattattaattaagttttttgccccaatgtttatcctctttaatccatcatcatcttcaacaccttggttaggctctaactcatcttctagctctaattccaaaaaatctattatcttttttaaattatatggattaataatgtcgcttctcaaatggataattttttggttatatacattaccctgattgttatatactgggctatgatcacctcttgtattatttttactacccgtcatcttccatcaccaaaacgtccttttacatcgccatcgttattaaaaataggactatttcgtccttttgttttgttaatgtttttttgttttatctttattgatttaagaacatagccccctgtagctccaagtataagagtaagtagatgggttataactgttgtccactcaatagtcatttagattcaccttcttaaagaatttattagatatatgtattccgtaaaaattgagacattgattaacacttagttatattcaacaagaaaactatacaatttgtaaatacaacataaaaaacaaagtcatttctctggcctacatacactttcaaaccttatactccccaatactattaggttttaatctcctcctttctcatttggtgaagattcggtaaacaactcaaaaaaagattagtactaaaacgcatatttaaaaccattataccatatattatgaaaaattaagtaattcttaatctataaaattcctaaattactttctaatttctcactgattccccagagtatcatctcaaaaagaatccaactgcttgacctccaatacctcttcataaactctaattaagtatatttcatgcatttatattttcattgcttacatcaatttttgaaagataatacttgtttgctgtttaaattcaaaaaagtctaatccttcttttagttgtaagttggatcaataaaaattatgttatcccatttattaaactgtcatttacttcttagtgttgtaaaagccacatcaccttgaatcattttcttttgagcgaattccgccataactaaaagatatccttttttatagctcatgcctatgaagtggcgaccttgtgactcctcacttcataggatgaacagcttccaatcatccttaagagttacactcacttatgataaggctccccacgattaattcgaaaagcccgataaatctgctccactaaaatcagccgcatcaactgatgaggaaacgtcatcttcgagaatgacagcttgtcatctgcccgtttcatgacggcgtcgcttaggccgagtgagccgccgatgacgaaggtgattttgctttttccataagtcgccagcttatctattgtatcggccagttcttcggatgttttcatttttccttcgatggcgagggcgatgacgtgggtgtccgggctgattttggccaggatgcgttcgccttctttgtctttgacgattttcatgtcttggtcgctcaggttttccggggctttttcgtccgggagttcgatgatgtcgatttttgcgtaggctgagagtcgttttttgtattcttcaatgccttgcttgaggtatttttcttttagttttccgatggtcacaatattgatattcacaggtcatccccactttagaaacaagttattcatatatattgtccacaattgtggatatcttttctgtattttgtgtaggatcattcgttccctactagatatgttgcagtgtccccacataattcacaggctgtggataaactgttagtatgttcgatttttctgatttcgggcggaagctcatgatcatctatgtacatgtccagcacggtttcgatatgttcttcacaagaataataagcggttttcattgttacgtcctccggttttcttttgcacgcggcaattgttctcttttcaatataacctatttatacacatgttagtagtgcttcgggctgagttttatccacaattcggcaaatcacgcgcaaaaagagccggcgtttgcagcatccggctctttacgtgttttctcttttttctaagcgaaggacgaacagaattcctaatagacacgccagcagcgtacagcatacatcaatccagtccggctttccgccgtttaaaaaagagttggttattacggaaaccaggagaatggtgacagtcaccgcggcaagctttttcttcatcggctccctccttcaccgactgtcttcttgttatatagcctgattaagagggtcacaacgatatatacaatcataatcaatgccccgttactcacatcagggtatccaatcaacatattcattatgacaaaaacaatggttatacaaatgacggacaacaataagaagatactgaatgatttcaaatgaccaccttctttcttgcagtaacgtttcattataaaaagcttaccaaaagcggcaagctcttccgaaatgtttatactcttcaaagcccacccatcacctgcacatcatacagcttgagatggcttttcggcgtgacgatgttttttaagtttgggatggtcaggtcgttcagctttttgcccgttttcaggtcgaaggattcgattttggcgggctttttgtagctgtacgtaaacagatacagctttccgttttgatgcgtcagctctttgaagtcggctttcattcgtgatgcggggagcttgaaggcttttttgctttttccggtctcagggttgatgcggtacacgtttccgaagccgtcaacgaaatagaagctgcgctgctccatgaaaaagctttttttgaagctgaacggcatggagtcatagatcgtctgttcgtcatttttataagcggcgatgtcatacgttttgatggcgccgctgtttttcatgactttcaccatttgatagatgtgatctgctttttcccctctggtgacaaagcagacggcgctgtcgtccgcggtgagctgggattcgacagacgtgccttctttatacgtccatgtcgcgattgatgttgtatggagcttctctttatcagcctgaatgtcttggacgtgatagcctttttcgtcatctgtcggcgtgagcgcgaaaagatgatctttaaaaaagcctgaagcgcggatatagtgcggaatgacgtcttgcttccacctgccgtcaatctggcggtacagctctgagcgatagctgccgccgctcttgtcgtagcccgaattatacagcgtgtaaaagcctttcgcccgttcgatatatcccgcgctgtctcccgtatgctggtacgctcttttatacgtgtgaaggccgtcctgaacggtatagattccttttttgtcctccagcagtacgctgccgtcatgcattttggccgatccgagctcaagccccttcatgtgataagaagaaagccgtcctttttcatcggcgaagagggcgtagctttttccgccgccgaacgtgtcttggtcagccgcagtggagaagtacagcagcgcctctttatctttcagaaaatcagggtcatttaatgtgtctctcacaacctccgcaggatcttccgtgcggaaatagaagaagcataaaaccgctgcggcggcgatgatcactaagggtatccaaatgatttttttcacgttgttctccttagtgaatggtcagaatcgtggttgtgtaggacgagcttgtgatgtcgcgcgggtatacgcctaagccgccattagagtcgatatcaatcccggcttttaagaggaatgccgaccacagcagttttgagcagtttttggcgccttcatggcccgtatttctgttattgacgaagttgaaggagtactcatcaccgactcttgatacagcccagtcagcggcggcttgtttttgggcgtcggtgactttcacggtctggacgattgaattgtcttcgacttctctgccgttataagcaatctggcggacgccgtctcccggcacggattcaacaattttatcagcggatgaatacatgccgacatgcccgtgattgtaataagcggtgtatgagttcgtgtaataaatattgccttttgtgcttttcggaagttttttggttcctgacgatccgcccatcgcagagagcccttctttggaagcgattacatttccctgcaccttgtctgccgtgatttcttgatgaaactgcttgagaattgcttctgttgaaacgtgcttctgtttggcaagctctttggcggattggagaacgtcttgaggagtcgtgccctgctgaagctctgcgatttcttttgcgtagcgggctgtttctgtttctttcgcttttacattcataccggagaatgacagaaccatggtgaatgacagggccaacgggaggacggctttgaacagctttttacacatattacttcgcctcttttctttgagtataatttttccacatttgtattatatgacggaattgcgataaaaaaatagataatttacagatttttaaaaattttataacaatatataaatcatatgcataaaacattttcaaatatcaggaaatccggttatcatacaagaaagggggaggacatatgaaggacagaacgatcggttcgatgcgggtttccgcaatggggttagggtccatgggcatgtcggaatactatggcagccagagtgaggaaaagtcgatttccaccctgcatcatgccgttcatctcggcgtgaatttgtttgatacggctgatcaatatggattgggcgcaaatgaagagcttgtcggcagagcactcgccccattcagaaaggagctttacctcgcgacgaaattcggttatgtccgaagcgaaaagggtgagtttatcgaaattaacggacggcccgattatgtgaaaaaagcgtgtgacgccagtctgaaacgccttgggacggattatatcgacctttattatctgcaccgggttgatccgcgggtgccgattgaagaaaccgtcggcgccatgaaggagctgatagacgaaggaaaggtgagatatatcggattgtcagaggcttccgcagaaacgatcaggcgcgccgtccgcattcacccgattgccgcgcttcaatcggaatattctttatggagcagggaagcggaggagcatgtgctgcccgcctgccgtgagctcggcatttcatttgtgccttacagtccgctcggcagaggttttctttccggaaagatgacgtcgaccgatcagctggatgccgatgattacagaagaagaacgccgagattccagggagacaatttggcggtgaatatagggctcgtccaaaaacttaccgccattgcccgggaaatgaatatcactgctcctcagcttgcgctcgcatgggttctcgcaaatggcgatgatctcattccgatcccgggcacaaaaaagaaacactacttggaagagaacctcgccgctctcgacattgtgcttcccgaggatgtgaaggcgcgtttggatgagatgtttccgatcggcacggcggccggcgagcgttatccggaacacatgatgacattgttagatgaataacaaaagaggcccatcgtgcgggcctcttttcatgacagctttttgctcatgatgacatccgtctccagaaatccggtcttctcatacagcttccgcgccgtttcgttatgagcgaacacatggagagaaatcttgcggacacccaggtctttggctttgtcctccagccttgcgagcgcctctttcgcatagcctttgccgcggaaaggcggatgaaggccgaaatcataaataaatgcgtcctgctgcgggtggtccggatcggcgtgcagccacagccagccggcattttcctttccgtccaatgtcagcgtccataaatagtgatcggccgtctccaagccgtcaggaagcaggtcattaaacgccagctccgctaattccggcgcttcgtcaggcagccacgttcccgcttttaccttttcttcagcgtaatgcttggttgaatgggcgagataggactgaaattcttgttctgtcatcggctgcagcgtgatagccattgaatcactccttacaaaacacagactgaaagcggtatcatgaagtattatccgaaggctccgttttccgccggttttatgatttgttcggcttgtgccgttgaaccagtttgcgcaaataatccaatcgaaatgagacttgccaaggctgctgagagtacaatgaatttacatgttttcattacgaatcccctccgttaatctcaaaatttggtcattggcatcaattgattcttgaaaatacttcgccgccggtttgtaattctcctgttttttaaaatgcgccgcggcctgatacgacaagtcggaaacgtcactccacagctctttccttcttaactcggcgaaagctgattcaagcgcttcttcattgcggtcaataaagacatgctgtaagatgcgcagcttttgggtgtatacgggctcgtttttttcttcagcggcattcagcgctttatgcagccaaaaccggccctcatccgcctgttcctgtttcaataacactctggccagcatgtacagactccgcaccgaatacgctgattgcaaatgctccttttgatcgagagccgtttcaaactcgacccgcgcctcctcaagcttttcctgtctttcatagcaaatgcctgcgttaaagtgggcgagcgcctcaatatgcggatcgcccgctttggcggcttgatgaaccgccgtctgcaggagctcttcggctttctgatagtgaaacaagtccattctgttacagccgatcaccattaaacactgtgcttctctgaccgcgtacatttcattggctttgtagatctccaacgctttttccgcgtggttcatcgcaaagtagttttggcggatttcatagtaggcaatcgccacttgataattaaactcggctctttcaatctcattcggtatgtgccggagcctgctttcagcaatccggtaaaaattaatggcgttcataaaccgtttacggtaaaactcgtgcattccggaaaagaaataataatagtattgaatcatctggtctgttttttctttatcggcgttcagctggatcgtttttaatatgccgtctgttttctcatactcttccatcaaaagcttatagcgggaatcaattaaattaaaataaaggagcaccgtttgattttgtgtcatattttgcagatccgtaagcagttgttctcttaacgcctcagccgattcggtgttgtgctttttgatttcctcataccagtcactgatttttttcgcaactgtttcgtgggccatcacttcagccatctgtcaggacacctccctttcccattttgtgtaataaatatatcatatttacaggttcaaaaagagggtggcagcccgctagtttcctcgtggcaacaaaaaaacctccgcaggtgcggaggcgcatattttataacagtttttttcctaacaaagattctaccagctcgaccgctgttttgccggttttgtttttgtgatcgaggatcgggttgacttcgacaaattcagctgaagtgatgatgtcggcatcatacagcatctccattgccaaatggctttcacggtagctgatgccgccgacgacaggtgtgcctacgccgggcgcgtcgctcggatcaaggccgtcgaggtcaaggctgaggtgaacgccgtcacagtctgacaagtagtcaatggtttcttcaatgacctttgtcatgccgaggcggtcaatctcatgcatcgtatagaccttcatgcctgtttccttaatgtactcacgctcgccttcatcaagcgatctcgcgccgatgatgaccacgttctccggcttgattttcggggcatacccgcccaggttcaccagcgtgtcgtgcccgacgccgaggctgacggccagcggcattccgtgaatattgcctgacggcgatgtttccagggtgtttaagtcgccgtgcgcgtcgtaccagatgacgccgagctgtttatagtgctttgccgttcctgtcagcgttccgatcgcgatgctgtgatcgccgcccaagacgagagggaaccgctcattctcaatgacgctgtccaccttttgggcgagctgctcgttccccgagagcacagagttcagatttttcagctcttcatcatttttgagtttttcacgattaacggggatgtcgcctaagtcttccaccgcataccccatgtcagataaccgttcaatgagatgcgcgtagcggatggcgctcgggcccatgtccactccgcgtcgtgcttgtcctaaatccatcggcattccaataactgagatattcttgttcatccgtttttccacctcaacatgttgtatgttgtcctgtgcgggtttatcaaagatgacttggacacgaaaagatttaaagctctatctgtttttctgactgcttatgcttttttacatacagatgatagacgataacgcacaccgccatgaacgggatgccgcaataaagggcgagccgctgttctgaatcaaatgcgagactgatcagaacaaccgtatttaacgtcagcccgataataggcagcaccgggtacagcggtgttttaaacttcaggtcttccactttgccgccttcgcggatgtatttccgtctgaacatcagctgcgacagggaaatcgtaatccagccgacctgcgcgcttagtccggctaatgataagagaaacatataaacggtttccggcgcagccaccttagacagcagtgacaggcaggcgacggccagcgtcacgatcagagcgttcatcggcacgccgcgtttatttattttgccgagcgatttaaaggcttgtccttcgttcgccatggcatataagatacgcgtcgatgcaaacaggcctgagttggccactgagagcagcgcaattaagataacaaagttcataatatcggcggcatatggaataccgatttgttcaaacaccacgacaaacgggctttcgaccactcccgcctgcctccacggaatcatgccggcaatgacgatgatggagagaacgaaaaagacaagcgttctccataccgtctgccggatagagcgcggaatcgttttctcgggattttcactttctcccgcggcaaccccgatcagctccgttccctggaacgcgaagtttacggtaatcatcgtaataagcatagccttaatgccgttcggaaacaatccatcctcataaaaatgagagaagaaaggagcctgctcgccgtgtttcatgtcaatcaggccgaacatggcggcgccgcccaaaataataaacagcagaatgactaaaattttaataccggaaaaccaaaattccgactcagcgaacgcttttgtggtaatggcgttcaaaagaaacatcagtccgacaaacacgaggcaccacacccatacgggaacatgcggaaaccagcggagcatcaattgtcccgcagataaaaactcaatggcgcatgtcaccgcccagccgagccagtagagccagccgaatgcgaaaccgaaagcggggctgatgaatttggttgcgtacgtctgaaacgaccctgatacgggaagggcaaccgcaagctcgcctaagcagagcattgtcaaaaacataataaaaccgccgaccagataagacagaaccgcgcccagcggtcccgcctggttaattgtaaatccggtactcaggaaaaacccggtgccgatcactccgcccaaagaaatcataaacaaatggcgtgatttcattgtgcgctgaagctgattctctttttgatttgtattcactattctgcaccccttcagcaacttgtattggaaccaagccggtgctttgaaaccgatttgctgtccaaagagcctctatttgtatatgaatgttatatgaaattcattttcgtacataaagatacattatactaaaatactgtcgccacgcaaatagagtgtgctgaattttttatttgtaaattccatacaagccgagggaaagcattgccgcatcaaggttttacgcgttttgaagcacgtttgtgatcttttggatcgcccagtccaagtcttccttggaaatcattaacggcggtgcaaaacggatcacggtatcatgtgtttctttgcataaaagcccttcgcctttcagcttttcacagtacgggcgggccgcttctgtcagttcaacgccgataaacaggccgcgtccgcgcacgtcttttatgatcgggttatcaattttctcaagctcttctttaaaataacggccaagctgaagggaacgctctgccagcccttcttcctcaaggacttcaagagatgcgagcgataccgcgcaagcgagcgggtttccgccgaatgtcgagccgtgggaacccgggttaaacacaccgagaatgtcacggttcgccgcgatgcacgaaatcgggaagacgcccccgccgagcgctttgcctaagatgaacatatccggtacgatattttcccagtcaaccgcgaatgttttccctgtgcggccgagtcccgtctgaatttcatcagcgatcagaagcacattttcttccttacaaatggcggccgcttcttgtaaaaatccttccggcggaatgacgatgcccgcttctccctgaatcggttcgaataagaaagcggctgtgttcggcgtgatcgcccggcgcagcgcttctgcgtctccgtatggaattaattttatacccggaagcataggtccgaaaccgcgtttatactcatcttctgaagaaagggataccgcaagcatcgttctgccgtggaagttgccgatacacgcaatgatttccgcctgattatccgctactcctttgacctcatatgcccagcgtctcgccgctttgacagcggattcaacggcttccgcccccgtattcatcggcagaatcatatcttttccggtcagcttggctgttttctcataaaacggaccgagctgatcattatggaacgcgcgtgacgtcagagtgattttatccgcctgatccttcagcgcctgaatgatcttcggatgtctgtgcccctggttcaccgcagaataagcactcagcatatccatatattgattaccttcagggtcttttacccaaacaccctgcgcttcggaaataacaatcggcagaggatgatagttgttcgcgccgtaatgtgaagtttggctgataatttcttgagattttgtgaaagctgacataatctgattcccccttgttttgtaatcattcaacattagatcttgctttccctttttataaagcaagttccgtgccaatccgaaaaaacgggatgtttcgccagcattctttcttttcccgcaaaattttccggcagtttgtgtgcaaacttcagccaagcgcaaaaattttttgcgtttcccgctgacaaaataggagcaatccaattagattgctcctactcaacagttatttattcaattgtctctgatatacaatgtaagaatatagtaaagataatatgatacagccgatcgcagacatgaaaatgactgacactctatacaccggcggcaaaaaagctgcaagcatcatgagcatgcccgctaagacaaaaagtttcgaactaaccctgtgtgtatccttccaaactctttcactgctcagcgtccaaggtgttcttatccctaaaaaaaaattaggcttaacgatctgaatgaagtttccaaacaccatgaaaatgactcccactataaagtttcctaaataagatatagggagatcatatcccagaccggtaaagatggtaatcagattaatgacaaacagaaccgcaaacattgtattaaatatagccatatatggcctgataaatgttttgtagttatttttaggatcaatcttagggatgataaccattaaaatatatagaataatcatgatgccaataagcatcatcatcgcattagctttcgtttggtaatcatttgcacttccgtttaatccccagtgtgtcgccaaattgtccggtaaagatgaatatgtgcaaacccatgtgaaaacagttaaaactatgattcctgctgaaaagagatattttttcatgattccccgcctttcttattatcatgttctgaatcagtcagagaaaagaaccagcctataagatcctgtaatacagtggtatttaatgaatacataataaattggcctttcctctcatcgtgaaccaaatcagtatttttcaatatggtaaggtgatgagaaatactgggttttgacatgtcgaagtgttccgcaatttcaccagccgtcatgtcttgtttctttaataaatccaaaattcttctccttgtaggatcggccagtgctttaaaagctttattcaaaaactttccccctctcatacatacataatttagatatttaagtatatatctaaatatcaaccattttcctaaaaaagtcaatggttttattacctcaatttccatttatttttaaacattgtccaagcgcaaaatttttttgcgtttcccgttcgatttattttaaaataatgaatgttaagacgattgagaggaggaattgacctgcacacaaccagcgaattttacacactcgtgttacaaagcattttggaagagattgatgtcgggctgcatgtggtggacgagaagggcagcaccgtcatttacaataagaaaatgatgcagattgaagatatggatgaacgggacgtcctgcataaaaacctgactgatgtatttatgttttccaatcagcaggacagcacgctcgttcaggcccttcaagaaggcaaaacgattaaaaacgtgaagcaaagctatttcaataacaaaggccaggaaatcacgacgatcaaccacaccttcccgattgtgcaaaacggcgagatcaagggagccgtggaaatcgccaaggacgtcaccaagctcgaacggctgatcagggagaacatgcacaggaaagaacagaacagctacacgtttgacagtattctcggcaacagcccggtcattcgggaagtcatcgaaaacgcgaaacgggcaacccgcacatcatcatcggtgcttttggccggcgagacgggaacgggcaaggaactgttcgcccaaagcattcacaacggcagccagcgctcaggcgccccgttcatctcacaaaactgcgccgccctgccggatagcctggtcgaaagtattttattcggcacgaaaaaaggcgcctttaccggagccatcgaccagcccggcttatttgagcaggcgcagggaggcaccctgctcctcgatgagatcaactcgctcaatctcagcctgcaggcaaaactgctccgcgcccttcaggaaaagaaaatcaggcgcatcggatcagcgcaggacaaaccgattgacgtccgcatcatcgccacgatgaatgaagacccgatcaccgccatttcagaagagcggctgcgcaaagatttatactaccgcttaagcgttgtcacactgatcattcccccgctccgggagcgcaaggaggatattctgcctctggccgaagtctttatccagaaaaacaatcacctgttccaaatgcatgtcgattcgatcagtgacgatgtgcagcgattcttcctggaatatgactggccgggcaacatccgcgagcttgaacatatgattgaaggcgccatgaactttatgacggatgaaacgacgattacggcggcccacctgccttaccaataccggatgaaaatcaaaccggctgacacggaagccaaagccgccgcaagcacccagcccggcaccgatttaaaagacaaaatggaaaacttcgaaaaatacatgatcgaaaaaaccctgagaaaacacggcaataacatatccaaaacggcaaaagagctcggaatcagcagacagagcctgcaataccgcctgaaaaaattcggtctggaccggatgaaatgaatccatacaaaaaaaggctgagatgctcctcagcctttcgtttatatctgattggcaagccgctctccagtaaaccaaaagttctcactcactgccaatgtatgttccgtattctcgacttgatgccaccaatggcgcggcgcgtaaatgatttctcccgccttttgtctgaaacggatcggagacgccttttgcaccagcggtttttgctcaatgtctttttcatcaaagacattgatatttccttcgtacaaatacggagagtcgtccggatgatagaagatccattccttctccccgaaaatgacgccgttccacgcgtgcgtattgttaaaatcctgatgcagcggtgtgcctgtctgcttagaaccgagaaagaaccatttccagtcccgtcccgtttcttcatccgctctcaatgtgtcttttgtaaaatactcgggtgcggaatagacaaggtctaagtcattttggttcagctgcgtaaaattccagtcacagtaccatttgtcatcattctgatcaatgtactcgatatagttggaaagctttacttgtttaaacgttttgaccccttcgatatctgatttccggatggtgaccattctgtccccatagtgttcgtcaatgtattcaagcgtccacggcctgcattcccagtgatccattgcccccgtcaaaataaaaggtttcttatcagcatactcgcttacaaaaagatcgtacgataactcattgattgtcagtctgtcaatggtcatatccattccccttttattcggcaatctgccgttttttttgtttggcgtaactgtatggacctgaaaagatggtgacgttttgattctcaagccagaaaatcttgttgaacttctccagcaggtttctgtcgtgagaaacgcagatgatggtgccttgaaactgcatcaggctgttttcgagaatttcctgagattcaatatccaagtggttggtcggctcatccaggatcaggacattcagctttttttccattaagatggacagcttcagcctgattctctcaccgcccgacaggacggaaagttttttaaagaccgacgacccgtaaaatccgtacttggccagcatattccgggccatgccctcttcagtcagcagattttctttaaaaaattgcagaatcgtctgactcgaatctccgacatggctcttttgatcaatgtagcctattttaagattttctcccactttaatggtgccgtccgacagttctctttccccgatgatgcagcggatcagcgttgttttgccgacgccgtttctgccgacgatgccgattctgtctttatgctttatgcgcaggttcacattttgatataaaagggaagatccgttggtcacctttccgttttcaatgaacacaatatcttttgaaccggcgcccgcttcctgaaatgcgttttttaatttttgctctgtccggaccggcttattgatcagctcgatccttttcagcgccttttccatattattcgcgcgtctgtgcaggccgacagacggcggatttgagcggttggcccaatctctcagctgggcgatggattccttcatcttctgtatttttctctgctgttcttcatatttctcaaactgggcgatgatgaattcttcccgctttttcaagtattcgctgaatccgtaaggccaaatcttcacctcggtatcgtcaatctcgagcaccttcatcgccgtttggtcggcaaacgttttatcgtgggtcgtaaacagaatggttttgttcgattttttaataaacccttcaagccactcaatcgcatggacatccaaatggttggtcggctcgtccagcagtataacgtcgtcgttgcggattaaaatttcggcaaggccggcttttgttttttcgccgccgctcagctttgaaaacggctgatcctttaattcgctgaggctgagcccgttgcatacctcgtcaatcatcgcatgcatctggtagccgttgttccgctcaaatgtttccgtgtattgactgtacttttccaataaagcagtcagctcgtcaccactcatcggttctgaaagcttcagctcaatggccttcatttccttctggatcgccgctagagcttcaaacgatttttccagatattgatacaacgtcagatcctcatggggatcagcgatctgcttcagcaaaccgaccttcgcccctttgttgatcgcaattgttccttcatctgcctcaagctccccggaaagcaccctgaacagcgtgcttttgccggaaccgttcggcccggccacaagcactttctcgccttcattgatgaaaaaagaaacttgtttgaaaatggtatctcccgctaaatttaccgtaagattatgaatattcagcaactcacatcatccctttgtcattctggttcaaagctcgactttattctggatggcgacgctcgctttcagtttgtaaaagctgagcatcataaacagcgacaataagatggataataccccgattgcggtcagcagcaaagctgaatcaaaatagtccgttaagaatccgataaacggaaaggcaatgaacatgaagagcgaggtcatcaaactgataatggacagcagcgtggctctcgttctggacggaatctcattattcaccacctgactggatacgggttctatcacatcatagagcgcgttaatgacgacaaaagctgcaatcgtcacgtacagactgcccgaaggtataaacaggtaggccgccccgatgatgcagaatgtcagcagaagcacgcgcctcggcgtgaatttttccgccggcttggaagaaaagatggagcacagcgcctgcaagatggacagtcccgcaaaaataatggatatattgcgcacggacagcccttcctgacttaacaaatcttgtccgtacatataaaaaaccgatgtaatcgcaaagaaaacggagagtgacagcaccagatatttaaaggctttgttcagcctgaagaaatctttgacttcttttaagatgtcaccgaccgtctgcgtttcgtgttcactgttttcaaatttaatttccgtcagctgtgtaatgaccgccattgcaatcagctgagtgacaatcccggcgataaacacatacgaccatgatatttcctgcaagtagccgccgatgcccatggcgatcgcaagaccgagtatgacaagtccgttataatttccgatggatttgccgtaccacttttctttcccttgttctttcagtgaatcaaacaaaaaggcatgatccgttcctgatataaacgtcagcccgataccgtatataatatgggcgatgaagagggcgatgaagttatggaagctcaggaacatcaccaaatagacaatgaccataaaatggccgagcaagagcgatttttttctcccgattctgtccgagatgacgccgctcggcacttccgccagaaacatcgccaaattcaggaccgattgcaggatgcccacaagaaacaatgaataattcatacttgttaaatataaaatccaaattccccgttcgaaaaagaagtttccgaaaaaaccggagaagtaaagcaaatttcgattccgcaaatgaatacccctttccagctatctgcatttaacatcatgaacagaaaggagcccgtcagtctttacactaaaaccctctatacatggatcttgcagatacagacttttcccaaaacaaattgggcaataatgagttgtattctcgaataacccaaaaagttccttctttttttcagatcctatggcatcaatgatcgtttttttcttctctggatcgctgatgtcgcggatgaaatatttgatatagctcagctcatgcatgtaagccggcaggaacaaatggagctcaatatcaaacccgcttttatccatatggtaataatcattgaaatgactgacgcgggagacggacacgtccgctccggcccgccgaaacaaatcagccagcctttcaataatctctccgttgggataataatcggcataaacgattcggatcggttcttcttttgtcaaaaggggcggatctttctgcggtgtcctcccgctttcccatataccgatcagtgaatcagtcggtgtgatgatatgccccaaatccccggccagcttttgtttatcaaaataatgctgaataaaagttctcagcatgtcgtcctttaccttgaaggtaaataacatcggcaaatgattttctttaaaatcagcatactgccgatacctcatgtttgaatgatgaaactgggtgtggcaggtcacgtccgtttgattcgcttcgtacagcccgatgcttttttccagatcatcattcaaaataaattggatggtctgaaccgtgcggtgatccgcgggcgtcattttatattgcggattccgctcaaattccagccccttctcaaacgtgcgcttgaatcggtacgggccgttttccggcacatcgcccccggcggtccccggaatcagaaagctgctctgcaaaacggcttctatctcatcagacggctcgtccaaggtgactccaaagcgtttttcgcctgttacgttcaccccgagctgatcggatgagacgaggccttttacatacggaacggcctgttttatgttcaggaaactgccgagatgggggctttgattttctttcgtcagatgatagatgatcgtttgaaccacaccctcggcgtcgcctaaatagtccgggtgaatgtccacctgacaggtgcggggatctttgcggatgatccggcagttatagccgtcctgcagactttcatacataatgctgcaaatcatcttgcttgtgtaatcctgcgtatctaatgggttcaagcgtatcgggcttgtgtcgatttctatttttagagggtcgcccggttttctcgccgtacgatgcatcgtcttcataaagcgctttccttttgagaaagcttcgtttctgtaatatgaaggccgtcaaagtccaggccgatgcgggtattcagggatttcgggcttccgcctgcaaggtatgtgataatgtcatgagacataaacgaggatataataccgtttgtcgctcctaaggaacctttgatcggttcatcggggtaacagttcagaagtccggccggcatgtttttttcataggtgacgccggattgataggattcaggcgtgagcagaggcccccattggccgctgaagctgccgacacccccggtcataaacgcgatattccgctccttacaataccggtaaacccattcagaaatgttatggggtttgtcagcggcatttatgacgatatcaatttcatacggatctaacacacgcaggtcctgcggctgtgtcatttccttatggtaaagtgctgcgtccgcattggggttgatacccgcaatataatctctgcattctgagatctttaatttgcctacagaagattgattatagacgaattgtctgttcaggttatgtactgatacggcatcgaaatcaatgagaataaaatgctgcaagcccgccgccaaaaggttttgaagaatgatcgttccgacgccccccagacctacgatcgctgccctgctgccgtctaatctcttttggatcagattggggttttggttgtatttctcaaaatggtacagctgcttttcagtgatgcggccttcacggccgttttgccatggctctattaaagcatccaatttcattaatgcatcgaaaaaatggtttcccgcttcctctcccagaagatcagaaagctcttgtttttcacagccgatgatcagccgttcaaccgcctctttgatctcactcgtatgcgcaagcttaatcgcctttcgattttgaatgataatatgcgccgtgtaggtcagcacctgcacgctgtctttaaacttccagcgcttacagtccgttgacatcatgacataccccctgaaagataataactccccaatgaggggagtcacggctttactagcagcgatgcaccaagcttgctgtttctgtatcaagatcaagttcttcaatcttcatcagtacacaccccctttaccaataactagatattatcaccaatattggaaaaggacaagttattttttgaaaatttagaatttatatataaattgtgatttttcttccttctgcccggtttatcccggcagccggatgatgaacacggagccttttccctgctcacttttcacttcaattgttccgttatggctgtcgataatggtttttgtaatggtaaggcccagccccgcgccgccggattgacgggatcgggaggtttccgccctgtaaaaccggtcaaacaaatgagggacatgctccggagcgattcccgttccgttatccgcaatcataagcatgattcctccgtctttctgcagggagacggtgatgacacccttgtcttcatccgtatgctgcaccgcattgtaaaagaggttgagaatgacctgcttcattttgtctttgtcaaaaacggcttctatcttttgatcgacaaagaactcgagcttccggtttctcgcgagcagcttcagctgagcctccatttccaaaatgacgtctcccaatgcgccttttttcatttcaaagctcggcacccggtcaatcttcgcgagaaacagaagatcctctatcagcttattcgccctggcggattccgcgtacatgctttgaagcgctttttctttctgctccggcttctccgccgctccgcgcattaacatttcgatacagccgtgaatggaggtaagcggcgttctcagctcatgtgatgcgtctgatacaaactgccggatgcgctccttcgcttctttttccgcctgaaaagaggtttcaatccgttccagcatctgattgatggagatacccaatgactcaatttcggcctgccttttatcaatcggcagccgtttatcgagactgccggcatgaatgtcacccatcatacgcacaatgcgggacagcggcttgagtgtgagccggatcaccggcaagaaaacaaacaggccgatgaccaaagccgcaaaggaaagcaccgcaaatatgctgatctggcggaaaagcgaatcattcaaaggctgggtcagcgtgctcatctgcacaactcccgcctgccttccgtcaacggaaatcgcctgaaacacgacgatgatttcctgacctgacttattgtgagccacctgatagtgaagcgccatggtatctgtcagcgcatcccggtacacttttttcgggaaagaaggagcagcccccgcgtgcgggtcttctgataaaacagacatcttgtatgattgattgataaaagcaaccgtcaccccggggtaaatcaaattcggatgagccggtgtttcggaacgggcaagggttttgatggacctccatacgctttgatccattgaattgatatcactctgaatgctgatcgcctgattttcatacatcgtccgtgtcataaacatgtactgagtgccgccgatgaaacataacagcaaagccaaaatcgccagtgacctgaacaggagctggaaccgcagggttctgtacagccgtttcattccagatccaccctgtacccggcgccccgaaccgtgcgaatcaccttgtgctctttgtccttcagcttttcgcgcagagaacggatgtacacctcgacgatattgtcttccctaaggaccgttccgtaatgaagccccatcgttaaagaatcaatgagtgcagactcgccgtctgcactcagcttgatgcctttcaacttttccatgatgcagtctctccttagatgtatcagcctgtgtttatttttttcgcttccccttctattattcgcttttatctgaaacaaaacggaatctaagctgaattggtgaaaggaaacgctgaaaacggagcaatctgcaaataaaaatcattatctgccgcttcaattcagcagcaccagtctgtttcaatcacaaagttctaagttcacgtctacctttttctacatatatccatttttaactgaacgtgttgtgacccgcgttcagttcttttttatggcttctgaaaaacggcataaaaaaagcgccctgaaaaaggacgtttaatataacatgtttcatgttcttaaattctgcattctaaaataattcttccttcacattcaccttcaatttcattcaatacgatgatcacatcagccgttttcatgtgtgtcacctcccgttttcataatagtataatattaacaaataaatcaataaaaaacagcccggttgtccgggctgtttttttatttctgtaatcgatccgcttctgtcagtttgacttccgctgtttttttctttcccgaacggtagaacgtgatgttcacacggtcgccgatctttttgcgatacaggcgctcacggagatccacaacgtcattgaccttatgtccgtcgaacccggtgatcacgtcgagctttttcaaacccgcttttccggccggtgaaaacgcgtcgacacccataatgaccgccccggttttaacgcctttcggaagtttcagcgtctggctccaatggtagctcgcaatatccgttaaggatttcatctcaataccgaggaaaggccgtctgacttctccgtatttttctaaatcctgaataacgggaatgacaagctttgacgggatggacaggccgatgccttcaacggcggattcagcgatcttcattgagttgatgccgaccaccttgcccgatatatccatcaaagcgccgccgctgttgcccgggttaatcgcggcatcggtctgcagcacttccgcattccaatccggctgtccgtcgccgtttgagtcaacgggcaccgccctttccgtgcctgaaatgatcccctgtgtcactgatcccgcaaattcaagcccgagcggatttccgatcgcaatgaccggttctccgactttgacctgatcagaattgccgaactgggcggccgatttgattttatcagactttaccttcagcacggcgagatccatcagacggtcgctcccgatcagctcagcaggcacgcgtgagccatccttcaggctgatctcaatctcagtcgcaccttcaatgacatggtgattggttacgatataagaagtgtttccgttctttttgtaaatgacgcccgacccgcttcccgcttcgccgccctctccccaaatatcggtcttttggatattgagaacgccgactaccgaatctgatacacggctgaccatattcgtgacagcgtcattgacatttacgttgactgttttcacctgttcgctgccgagacgctggctggtgcttttgctgctttccccatgatctccgcctgtccagtacggcagcaggaaagccatgagcgcggccccgacgatgacgccgatcagacttgatagaaagtaccctctcttgctgcggcggggctgttcggaggcgtactgttcatcatcgcgattataatccaccctatctcaaatcctttcaagagtactcgatttgcttatagtgtgggtcagatcgcggattaataatcatgattcatttggaaaaattacacggcgcacagcggcgtcgggattttcggatcggtatcaaataactgaaacgtttccccggcgacaaatcctttcgcagccaatgtctgctgcacggacattctcgccagttccttcatattgttgtcttggctcagatgcgccaaatagatgcgcgatgtgccgtcgccgatgacatcagtcatggcgagcgccgcatcttcattggagacgtggccgacatcgcttaaaatccgccgcttaatgctccatgggtatctgcccatttgcagcatgccgacatcatggttgctttcaaacacaaacacattggccgaacggataatgcctttcattctgtcgctcacatacccggtgtccgtcatcagcgcgagctttctgccttggtagtggaaaacataaaacatcggctcggccgcgtcatgagagacgccgaatgactcaacatcaagcccgccgaaggatttcacgctttccatcgggaacagaaacttttgtccggtatccagcttgccgatctgattctccatcgctttccacgtcttttcattggcgtagacgggaagtccgtactttctcgcaatgacgccgagccctttaatatggtcgctgtgctcgtgagtgacaaagatgccgtcgacgtcgtctatcttgcggccgattctctccatcagcccgtccatcgctttaccgctcaggccggcatccaccagaaaagagtgctcctctgtctccagataaaacgcgtttccggtactcccgctcgcaagcacgctaaattgcaagcccattatgtctcactccattatttattttgattgttatcaatgactgtgctttccaatgcattcacagtgtacgtttgctgtgtctttttcttcgtcccttttgacttatcttcaattgtaattctccataccggcgccagcacctgcgtacttgtcagcggatattgggcaatatagccgaacttaacgcttttaacggcgcaattcgcttttaagtaattttgagaatacaataattcgaccgcatcaagctcaggaatcaggctctccgtctggattcgcttgaatgactccagcatggtctgctcgtaagatacgacctcgtttttatcgttcaaatgcagaatcacctgtccgatcgcatccgtggacgagtcaaaatcctgataaataaactggccgtcatacatctggtaaaaaatgatctgttttttatccttgtcgactttccacagtttatatttttcaccgccggttattttagagctgacgagcgattccgcatcctcttgcggtttttgcttcgataaaccgaccggatcggtaaatttcattttcagcgtcgtaaccttgtgatcatccgccggcatctccattaacggcttttgatccttcaaagcatcaatatcttcagcggtaaatactttttggcccgccgtcagccggtagcccgtcgcggaatcagaagacaggttgccgaaagtgatatgatccatctccatgtctttttccacatttgaatttttaatcacttcgtattcactgctcgagcgtttttcaaaaaactgatagccgagaaaaatatcaaggatgaggaaggcaatgatgaagatcgtttttgtcttattccactccattatcgtcctcctccttccccagcagatctttcgtaatcggaacgatcttcccgttgattttcatactccagacgggttccagttcaacgagatcattcgttgatgaagagaccatttgataggccaggaagatctggtcgattttattcacgtcgtatttatcctgctgctccagcagagacacaacctcattgccgttcatcatttttacgtcttttgttttaatcggattcggtccgagaacatagttcggccgcttgtagctgagaacctcgtcattggcccattgcagggtcaaaacaggtccggatccgaaaggcttagacgtgctgttgatcacaggcatttggtctttaaacatgtagaaactcagctgctggttatcactcacattgaaaaattgataatgatccgtccagcttcccgtatcctctaaatacttatagcttttcttaatcagctcccctgtttgataagaagcgctttgtgccaggttccgatgctggaattgaatctgccgctgtgtcgaattgatttccagacggctgattccgtcagtcagcacattccgattgtaattcgggtcttctctgaccgtgctcggatcattaaaaagcgtctgcttaaacaggttcgtcttaatggtttcagtgataaattctttttccttcatattaaatcgcgcattcggcatgagaaattctttgctttttccgaccgaatagaggtggtataacggcatactcgactttttgctgtacagctcattcatcagattgcggtaattcgccgattccacagtcacttccaaaatcagctgcttgctgtatgagaccatgtaaatcttcttatttgtcttattctcattaaacggaatgacaatatggtcaaatgagctgtattccattgacggattcgaccatttaaacatcgattggaaaaaatcaatcggaatggtgtcattgaattgcagatcgagctttgccgaattgccgtttctgccgtaaagccaatttttaaaaccgagcttgtcgtattgatcggaaatatccttcatcccttttacttcccattgcggcaaatccgcccacaggtcattaaagagcgtctcatcatccactttataatgagagccgtttgtatgaataaacatatcccggggttttaccgtttgcgacactttttggctcgttttatcaattttatgcttttcccggacagtcgatttggttgaggccgtgccttctgaaaaattgggctggaatgtccaaattccccatgttaaaacaagactaatgacgaccagcactgacagtatgactgtttttatattttcacgcctcatcccaatcatcctcttgctcttctttatatggaagagtaaatgtaatcttcgttcctttgccttctacactgtcggcccaaatgtctccgccgtgcgcctgaaccatctcttttgcaatcgcaaggccgagcccggtgccgccgagttttctcgtgcgcgctttatccactctgtagaaacggtcaaagactttttccacatcttttttcggaatgccgataccttcatcttttacgctgatataaagcagctcttctttctcattcacatcgactgagaaagtgacatgtccgccttccggtgagtatttcagtgcgttagaaatgatattatcgagaacctgcgtcactttatcctgatcaatctccacgtacagatttctgtccggaagctcgcggataaattcgacatgctgttctttcgtcatttcaaaacgatcgataatcagtgacataaagcggatcatatgaatccactcccgattaaactgataatctttgctgtcgaatttagaaagctgaagcaggtcgttcaccaatctgatcatgcgctcagtctcattttgggtcaccattaagaaacgcggagcgatatctttgttttcccacgcgccttctgcaagcgcctctaaatagcttcgcatggtcgtcagcggtgtccgcagctcatgagacacgttggcaacgaactctctgcgttcccgatcgagtttttcctgttcggtgacatcataaagaaccgcgattaaaccgtcgatttttccgtgctctctctgaataacggaaaaattcacccgcagtacagtcgtttcatcgtcacgttcgatctccagcagcatggaatcctgctgttctactaaatcctcaaatgtaaagttctcttttatgcctaataaagacgtaatcggcatctctaaagccgtttcacgtgaaacattcagcagctcaagcgcagggctgtttaaaagaataatagctccattgcgattcgtagcgatgacaccgtccgtcatatacgcgataacggaagaaagctttcttctctccccttccgtcatggcttgggcatcttcaagctctctcgtcagatggttgaacgtcgttgcgagctgaccgatttcatcatgcccgtatttccgcacctttctggagaaattcccttttgccagttccatcgcctgcttacgcatatctgaaagcggatgggtaatggtgcgggcgagaaatataccgagaagagccgtcagaacaagggctaagcctgttccagaagcaagaatcgagttgacggttttcatctggttaaaggtatcttccatactggccacgacatatatcgcgccgacaacttcctgattctctgtgacgacaggttttgctgaaatcagcactctgtttttgcttttaggatcataatatttttttgaataggcctgttttgttgagaaaatccgtttaaaaatcgggtcagtcgtctgtttccccgctatttcctcgccataaggcctcgaagaaccgacgacctcatagcttttatcaacaaatgtaatctcccgtatttcattgtttttcgtaaaatcattcaaaatccgtttgacgtcatctttaatgacggtgctgtcattatctcctttatattcctgctcaatataataggatagattgtcaatgcgctgatttaacgataattcataggacttgagaagagaattctccacctgtttcacaaagtacacgccgataatctgcatggcgatgataatgagaagcacatagatcagcgtgatcttaaattgaatcgaccgaaaaaaaccaaccttattcatcgccggttagtcctgttcagggtttctcaagtaataaccgacaccccgtcttgtgacgatccagttcggatggctcggattatcctcgattttctcacgaagacggcgcactgttacatccaccgttctcacatcaccgaaatagtcatagccccacacagtctgcagcagatgctcacgcgtcatgacctgtccgatatgtttggctaagtaatgaagcaattcaaactcacgatgagtcagctcgatcgtttcttctctttttgatacgacataagcgtcagggaagatgacgagagaaccgatatgaatgtcattagaagctgattcttcctcagccggcgcaaccgtaagctggcggcgcaggttcgctttgacgcgggccagaagctcacgcgtgctgaaaggcttcgtgacatagtcatccgctccgatttcaagcccgatgaccttgtcaatctccgagtcttttgccgtcagcataataatcggcatatcatattttttccggacttcccggcacacttcaactccgtctttattcggaagcataatatctaaaagaattaaatcaggctgaagctcctccaccatttccacggcttcgtttccgtcgtacgcacaatgcacgtcatagccttcttttcttaaattaaactctaatatatctgcaatcggtttttcatcatcgactacaaggattttcttatccatcatcttgattttcctcctgccagaatgacttcatttcatctattgatgtttcatgatgatcacaattcggatcgtgaaaaacgttccccgtctattataacggtttcaggtcaaaagataaaaaaattaaatagaacagcgcaaaaacgtattgaactgccatccttttgtcatgttttttattttcttttaaaaaataatatttttttgaaacctcacgaaaaaaaacgccgtctagtgtttgacgtcttcttctgggccggctgaaaagccggctctccctttttttataacaaaagaaaaaacgcacctactattgcagatgcgtttgggtaagtggctcgggacggaatcgaaccgccgacacacggattttcagtccgttgctctaccaactgagctaccgagccagatgtttcttttctatactataaagtaaagtaaaatggcggtccggacgggactcgaacccgcgacctcctgcgtgacaggcaggcattctaaccaactgaactaccggaccttacagtaatttgtccggagagccgtatcgtggcggccctccgaggacaaataaggagttagcaataacgctaaagtaaatcaatgacccgtacgggattcgaacccgtgttaccgccgtgaaagggcggtgtcttaaccgcttgaccaacgggccataaaaagtggtgagccatgaaggactcgaaccttcgaccctctgattaaaagtcagatgctctaccaactgagctaatggctcctgatgtgtcggattatgtatcatagagcattcagacaaaagctttcttgcagtactctattgaagctgttccgtaacaacgagatttataatatcatagaacattcgaaagtggcaactacttttttgaaaaaaatctattatttttttcctacataaaaaaacaagcctccgtgaccggaggcttgtttgctgcaaattcttagttagcgcggtatacactgcggatgacgttcgtttgtgaacggtcgggaccgacagagaaaatagaaagcggaatacctgtcagctgagatacgcgttccagataatggcgcgcattttcaggaagatcgcttaatgtttttgcgcctgtgatatcttccgtccagccaggcatttcttcatataccggttcacactctgcgagagctttcagacttgccgggaattcttcaatcacttcacctttgtagcggtaagcgacacagattttcaatgtttcaatgccagtcagcacatcgattgagttcagagaaagatctgtgattccgctgacgcggcgggcgtggcggacaacaacgctgtcaaaccagccgacacggcgcggacggcctgtcgttgtgccgtattcgcgtccgacttcacggatttgatccccgatttcatctttcagctcagtcgggaaaggaccgtcaccgacacgggttgtgtacgctttagatacaccgacgacgtgctggatttttgtcgggcctacgcctgaaccgatcgtcacccctccggcgaccgggttggatgaagtgacaaacgggtatgtcccttggtcaatatcaagcataaccccttgagcgccttcaaataaaacgcggcggccttcatccagcgcgtcatttaagacgacggatgtatcgcatacatactttttaatctgctggccgtattcataatactcatccagaatatcttcaattttgaagccttctgtttcatacattttttcaagcagacggtttttctcttcaaggttccgttcaagcttttcagcaaacacgtcacgatctagcaggtctgcgatccggatgccgatccgcgccgctttgtccatataagcaggtccgatgccttttttcgttgtgccgatcttattggcccctttgcgttcttcctctacttcatccagtttcagatggtatggaagaatgacgtgggctctgttgctgattctcaagttatccgtgctcacattgcgttcatgaagatacgcaagctctgttatgagcgctttcggatcaacaaccattccgttcccgatgacacacgctttttctttataaaaaattcctgatgggattaaatgaagcttgtacgtgacgccatcaaacttgatggtatgtcctgcattgtttccgccttgataacgtgcgatcacttctgcattttctgataggaaatctgtaattttaccttttccttcatcgccccactgcgtacctactacgactactgaagacatatatccgtgcacctccgttaacctttcaaaacgatatctcattcaaacaaattaagtgtatcagtgccgaaacagaaagtcaatcgtaaatccgaacatttaaatcttatcaatctatatttgttcgccttaaacatgattaaaagcgttttctctttcatttgctatctattactcccgaaactttcatgctttaacaagaaaaagaacccgtaatcagggttcttcagacagtcacttatatgccgcttgtattcatcaggacgacccgccagccgtcaggatcttcgatggtcacgcctttttcttcccagtacgggttttcgggtgctttctcctcatatcccatctgctttaatgtcgtgctgatgcggatgacctcctgctgatcctggatgtaaaagacaagcaggctgtcgccgtgcggaacgggcgccggctgagacgcgccggtttcttcggtgaattctaagtgatattgcgtatggggcaggccgaacatgacgccgctgtagccctcatgtccggaaaaactgctgaccctcttcagcccgaggccctcttcataaaacctgatgatttctttgagctgtccggtcggccgggcaatccggatttgcgccgcttgaaattgaggaaattcaattgtcatcatcatccctcccttaatgccattatataaaagcgctttctttttttcgtctgccgaacggacggcattctctcattctttcggatgaaaaaaagcctcaagacattgcttgaggctttacgcacctgccggaacaccgccgtcatcaaagcgcctttccaggtttacgaacttattgtattctttcacaaaagccagtgagacggtgcccaccgggccgttacgctgtttggcaataatgatttcgatgatgtttttgttttcggattctttatcatagtaatcatcacgatacaggaaggcgacgatgtcggcatcctgctcaatacttcccgactcacggatatctgacatcatcggacgtttatcctgccgctgctcaacaccccgggagagctgagacagggcgatgaccgggacttcaagctcccgcgccagcgcttttagcgcccgtgaaatttccgatacctcttgctggcggttgtcgcttgaacggccgcttccctgaatgagctgcaagtagtcaattaaaatcatgcccaatccgttttcctgcttcagcctgcggcattttgaacggatttcgctgacgcggatgccgggggtgtcatctataaagataccgctgtttgacagacttcccatcgccatcgtcagcttgccccaatcttcttccgtcagatttcccgttctgagattttgggcattaatattcccttcagcgcagagcatacgcatgacaagctgctcggcacccatctcaagactgaatatcgcgacgctctcatccgttttggtggccacgttttgcgcaatatttaaggcgaacgccgttttccccacagacggacgggccgcgacaatgatcaaatcattccgctgaaaacccgccgtcatccggtcaagctcaataaaaccagtcggaatcccggtaatatcgcctttccggttgtgaagctgctcaatgttgtcgtatgtttgcacaagcacgtctttgatattttggaaggcgcccgaattttttcgctgcgcgacctccataatcgttttttccgcatcgcttaataaatcttcaacttcatcctcgcgcgtatacccgtcttgagcgatcgaggtcgccgttctgattaaacggcggagaatcgatttttcctcaacgattttcgcgtaatattctatattagccgctgtcggaacggaattcgcgatgtccgtcaggtaagagacgcctcccacctcttctaacaaatcggtattcgcaagctctgacgttaccgtgaccaaatcaaccggttcaccgcggtctccgagcacgagcatggcattgtaaattttttgatgtgacattctgtagaaatcatccggaatcaacacttcagaagccagtgttaacgcagacggctgtaaaaaaacagcacctaacacggcctgctcagcttctatgttttgcggcggcagccgatcattcagaaggtctgtcatgctaagcaccgtcctctccttaaaaaatatccaaactccattttaccatttctcaagaaaaagaatagaaaaacatcactttccctgtatttgtcaaacagcggctgcgtgtttcaccattccgaatgctgggaaacaaataaataaatcgaaaccaggaggtaagaaggatgaaaacatatgcagtaacacccagtattgatgcggacggatggtttgtgaaggtggaaaatgtggcgccgacggctctttatacatcaaaggacgcggcgatcgagaaagcggagcagacggctaaagagaacagcccgtctaagcttgtcatttatgatcagcataaaaacattgaagaagaacggtccttttaagaaaagccttcgcccgagcgagggcttttcttattcgatgaaacggatgtgcagcaccgtctgcgccatgagatcggccgttttttgatacagctcccattcttcacaggcggcgaatactttcatcatgtcctgcaatgtctgtttcagtatgataaattcgtcaattgtccgcagttctgcggcttttttctgataatcagccagcttcagctgtaataacatcaatggcgattgcataaaaaacctcccccattctgttataaagccccgcttttcaaacctccattcctttgtcatatcctcttacgatagatttctgattttagtacaataaagaaacggaaggagtgatcacatgaaaccgctgcaaatttccgccgaaacggcgcaaaagctcgcagaatcactgaatatgccgcttgagagaatcatgcacatgcctcagcacattctgcttgccaaattagctgaagtccaaaaagagaacgatcacaaataaaggctgctctctcatatatatgtgcgggaggcggaagcgatggctttccgcctctttttttgtgaagaaaattttggcaaaacattctttgaacggaaccgctccgattttaaccgtctcacagctgaaaaaacttgttgacgaaggaaaagtgaaatatttcttattatccggaaacaattcaggcaacacgaagcttgtctcatggatgaaaaagaacggcacaaaaatctcagctgaccaatacagcaccggaaaaacaagctcagcccggcaaggaatgacgggcggcccgggcggacaaagtcagcagactctgtatgagatgaaaaaatagctcggaaagaggctggatagttaaacaccggcctctttattttgctcttgaagcaccttccatgcggcgccggtatcattcagaaaaatgattgataaatcctttctatttttgaaaccatcagttcctgacgcagatgccggccggcataggagcgcgcttcttttccaagccgttccctgagagactgatccgtaatcagcattacgagagcatcagcaagttcgcggctgttgccgggctgacaaataagccctgtggcctcatgccggatcatctcagggattcctccgcagtcagttgcgacaatggcttgacctgagaacatcgcttcgatgatcgctatagggaaattatcattcaatgtcggcaggacaaatatagatgattcagccaaaagcgccggcacatcacgtcgttttccgaggaaaaacacatttgagaggcccagtttccgtctcttctcttccagaaaccctctcatgtttccgtctccgatgatccatatatcaactccggataaatggtgccggatgcgggcgagagcgtccagcagcacatcatgtccttttcgctcggtcagacgggaaacgcacgcaatcacgagcttttcagcacgttttgactcaggggcatcctgaatatcaatgccggtatgaacagtcgtcagctgagcctccttcgctccgtactccagcaagggctcgtgaaaggagtcgctgattgtaatgattttatccgaagcccgaataccctgcctttctatttcactgaaatatgcctcttctattgaacccttttggattttatgaaacttcatccggcttttcgtaaaatgtccgtgcggcgtgaaaaaaagaggacgctggtacgtttgattaaggtatcccagcaaaaataccgcaaataaatcctgcgcgtgaaacaggtcatattgttctaagtctttctccttcaaaaatctttgaaagacatgtaaatagctgagattcttcacaaacttttcgtttgcggcgccgtttctgccaacaagaaacgctctgatctcgtcagcggcccgcgggatatcttcctgaaaaaaagatggcggcatttgaagcggcgagatgacatccgcctgatgaccgatgcgctcaaaacccgtcttaattgatgtgatataactcgccaaccctccgacattcgggtaacggagaaaggttgcgtacagaatacgcaatggcttttttcgtttgggggagctttttccttccgcacagaacgaatacagcatctctggctcactttgatgttcgatcccgtaaaattgatccatgacgcgcaataaggctggaggcaccagaccgttcggcttgccgatctcttctttcacatccgctccccctctctcaaacttataatcctaattcccgtccccattttgacactttgtcaacatgatacggcagcagttcccctccccgattgtcgaagattctccgcaattgggtatgaagccctttctcaagtgttctctgcaaataagccattttataaagcgtcataggaggggtctgaaaatgaatgccccgctttttcatttctttcgtatacacttttacgcaatacgtccgaatatcttctgcgtgccggctccaatcttttctgaagccaagcagaatttcaaccagcaccgtcatatcaaaccaaaccggcgcgtattttgcggattcccaatcgatgaattgaatatcccacggttcatgtccggacgcatcgtgggtgcagatattctgcatatgaagatcaccgtgtgtgatggctgagccgttttgtatcaattcagggaaaaaatccggctcctcctgctcaagcaagtttgtgatttgccgataatgaggcttcacgatatcttttgtgcgctcatctttaagagccctatccaataattccgctgtctttttgatctgctttttacgcccttttctcacggtttccgattcgtataccggcagccacgaccgccatttaccgtcaaaaatattcttgttttcaaaggtgcggctgtgcaattctgcgacagtcggaataatatacttgaaatgcttcgggtgaaatgtaagctgtcccctgatctggctgacaaactccataaatatccacgtttcatggtcactttcttctataagatagatatccggcagcaaatcccctaaaacagaacgggctttcccgtatatattaatctcgaccttgtttttttcacgggaagatttatataccttcaatatcagcggaacagtgccggattttttctttacaaacagtttataaatggcgcttctgtccgtcgatttcaggcatgtgatgtcatccggattcaccgcagccctttcaccgaacgaatacgacagtttttcgtcaattctcagtttttgaaatgcgccatacaaaatctccttttcatacatgccgatcttccttccgcttccgtttccagctgtttttgagatgagaccaagtgtttctgataaatggcatcgggtcattccaagcaaaaagagcgtactctttttttcctttacaccctttccaaaaatcccggaacgtcatttctcctctttttcgtttcttcaaaaacgttaagaaataacgcacctcataaatccagttgattccgtctttttgttcgagctggggcttcacatgttgtccggtcaaatacagatagtacatgtaaacgaaatgaacgcctgccggttctgtcaggctatggctgagccaaaagcgcggattaatttcgataaacttgtaaacattgtcccggggatcctttttaaattccgccatgcctactcccttcagctgaatcgcttcaaaaaacggcagggtcttctcgattaaatcaggaagccgtttgctgacgacgtgggcccccgcgccaaaatctgcagggaattgatggttcttttgcagagagaataagcccattaatttcatttggtcatcataaaaagtggcgactttataaaaacactggttgtctccggggatgatctcctgcacgagcagttctccattttctctgtaggagctgaactccttgcgcaattgtgcggcatccttcattacaattgcttttttgtttactttttttctgtattcatggccggccaccggttttaaaatacacgggaagtcaatattggcgatggcctcttccagctcatcctgattgttcggaaaaaaggttttcgggcaggggatgttatgcttgaccgctaattcatatgctttgcttttatctaagaccgtttctaacagagagtggctcgggagcaaaaataaaaaaaaaccggctaatgtctcgcggaatttagatataaatcccgcataatcatcagatcctgcgtacagaaccggctttgcttggaatcgcttcccgaaatcagtcagaaatgtcagcagttcttcctcttgtgttaaagggctgggacatatcccgcaatctgccaatcttgattttccgatacgataaggtccctccgtgtcaaacgcgtaaacatcgattcctcttcgggccaggctgcgaatgatcccaatcccgtttgcactgaaatcaagtacaacggctgcatgttcatgtttcatgatctccctccgagctgttggtattttgataaatcgattcgatattttttatcatcgtctcactgcttaaatatttctccgcgtaggcctttgcgtttgaagcagctatcttccgcgcagatttgttagtgataaaaaacgctaaagcccgggcaagaacctttacatttcccggctcgacaataagccccgttttgttatggcgaatcagatccggaatacccccgcaatcggtcgcgatgatagccgagccgctgaacatcgcttcaataatcgaaataggcagactatcattaatggtcggcagtacgaatatgtccgtcatattcaaaatagcgggaacatcatctctttttcctaaaaaggaaaccatagatagattcaattttcgagcctgttcctctaaggcgctcctcatctctccgtcgcccgcgatcagcacttcaacatgctcaagtacatcagatggaattctcgaaagggcgtccagtaaatatttgtgaccttttctcgggcctaatcttgcaatacacgagatgatgatcttatttttcggtaccggggtttttcttttcccgcctgtttttgcatcgtaatcgattcctgtgatcaccgttgtcatgtcttcctgttcggctccgagcttcatgagcgggctgcggaacgtatcgctgataataatcaggcgatctgcgtattcaatggctttcatctctaatgttttataataaatctcttctaccgagccttttttaaagatgtgaaatttaagtctgttgaaagtaaacatgccatgcggtgtgaaaaataaaggttttttatagatttgattgaacctgcctaacatattggctgtaaataaatcttgagcgtggaacacatcatatctttccaaatgaatcttttgaagcatttgctcgtatataaacatcagccgattatttttcaaaatatgatcgttataatccccatatctgtctttaaagaaatcttttaatttcggaacaacagccgcccgcatttcttttacctgtgcggacggaaacagattaggggatatgacatccaccttatgacctctctttttcaggccttcactaagcgttttaatatagtttgataaaccgcccgtgtgcgggtagtcccaaaacgtggcaatcaaaatggataacttcttttttttcctgtataccggcggaatttgatctgcatgtttcatctgtgtctttatggctttctgtttttgcaggcgcgttttgaccccgtagtagcggtcaagcgtctggatcatatacggataggggacggaaaatgtcttgttcatttccagatcctccgcacgatttcaaaagcttcagcgtattccacacccgccgtcatccctctgacttttcctaaatgttttacgccttcatatgaacggggatgagggtaatccctcatttctacgtcatagtggtgaagcgccgcgagtttggcatccattgtgtctgtgatgttaacgaagtaattaggcttgaagagtttatcagccgtattcctctcccactcgcttgaagatagcgtttcaaacgtaagcagttcgataggcttttgattcggaagcggtctggcggctgttaaaactgcttggaatgttctctggtggtccatattgatatcgccgtaatgatgtgtaaagattttatcaggctgatagacgcgaatgagctgctctaattctttgacaagcttatgaagagggatacattccagctctaaattcgtgtgctccaaaaagatgactttctcaattccaagctcttgattcgcgcgttcgcctaattgtttaatatgatgagcttcttcttttcttcctaatgccgtaataacggaaatcactttatatccttcattgatcagccgttttatggtgcccgctgatcccaatagttcatcatcgggatgagcgccgataaccataatgtattctgccattttttccacactccaccaaacaaatgttacaaatatcatatgacgaccctaaaaaaaggaaacttacatgtgcggattttcagaaacttacatgtgcggctgccattccaggtaacgtgacggatttaatttttttatagtgttcaaaaactcatccgccaagccgtatttgtccagtccttttaatagttttacgggaaaccgggtaatggcggaaaaagctcttttatggtcgatgactttaagattgccgtattcattgatcagaatgtgcctgatttcggcatcccatctggtaaaaccgattttctttaattcatccagcatatttaaaatatcagcagtcagtttgacggacagggatttttcttgtttgatatggcgggcaagagaggtgccttggacatattccatcacaatataacgatctccgtattcatacagtcttggaatcaccggggaaccttgtccggtctttaaagctgccaattccttcttgcatgtctctttttcaaagaagtactttacgcatttgttgtgtgttaaacgatagacttccccgtcttttccgtcaccgatcagcggatagtgctccagcgcctttttattctccggatgattaaaatatgtttcagaaaaaaatcgtttcataccgacacatccttcgttatgatgtaatataatatgcaatctggtaacgatcggaaatgaaacaatctcatcattttcttgcgctgcgccgtctgctgacatgaaaaaaacccgccggatcggcgggtttttcattgtattttacgcttcttcttttacgtgaaccttcagcacagcctgaacttcagggtgcagctttacaggaacgtttgtatatcccagtgtacggataccgtcttggagctccagtttccgtttatccactttaatcttatgcgttttttgcagcgcttctgcaatctgtttgcttgtgacagatccgaatagacggccgccttcaccggatttggcactcagctcaacagtcagctgttcaagcgtttctttcaaatctttcgctctttcaagctcggcaatcgcttcttttttctctttttctttctgtcctttcaatgcgctgatgttcgtcgcatttgcttcgacagcgaggccttttttaatgagaaagttatgtgcataaccgtctgctacgtttttcatttcgcctttttttcctttaccttttacatcttgtaagaaaataaccttcatctctgaacgcctccctcaaaatattcatcaatggcttccttcagccggacgagcgcttctgagacagaaatgcccgataactgggttgccgcattggttaaatgccctccgccatccagcgcctccataataatctgcacattgacctcgcccagcgatctcgcactgatgcacaccgtatgctcatcccgtctggctaccgcaaatgaagcttccacttcactcatcgataagagggaatcagccgcctgcgcaatcagcacctggtcaaagtactcctcttcgttctcaggaagagaagcaatcgcgatatgttctttataaagagacgtatgctggatcagtttcgcccgcttgatataagaaccgacggattctttgagaactttctgcaccagaaccgtatctgcgcctttcgctctcaaataagaagcggcgtcgaacgtccgcgagcccgtgcgaagggaaaaactcttcgtatccactattataccagctaacagggccgtcgcttcaatcatattgattttgagccgcttcggctggtattcaagcagctccgtcacgagttctgcggtggatgaagcgtatggctccatataaacgagcagcgggtctttaataaattcctcgcctctgcggtggtggtcaatcacaacgatgtgctcgattttgttcacgagacgctcttccatcacaagggacggtttatgtgtatcaacgacgacaagcagcgtgtcatcatttgaaatttccatcgcctcttccggcgtgatgaaccgcgaccacagctcttcatattttttaatttcttcaatcagacgctgaacgcttgatccgatctggttcggatcaatgacgatgtagccttctttgccgttggcctgcgccaccttcaatattccgattgcggctccgactgcgtccatatcaggaaatttgtgccccatgataatgacattgctgctttctgagacaatttccttgagcgcgtgggaaatcacccgggcgcgcacccttgtgcgcttctccatcggattcgttttgccgccgtaaaatttcaccttgccgttcggcattttgatcgccacttggtcgcctccgcggccgagagccaaatcgaggctggactgcgccagatctccaagctccttcaaggaagaaaccgatgcgccgatcccgatgctgagggtcaaagatacagtgtgaacggatgttttttctcggatttcatccaaaatcgaaaatttcgcgttttcaagctccgttaaaatgtgttcatttaacaccgcgataaaccgctccgaggacgtccgtttcaggaaaatgccgtactcctgcgcccacgcatttaataatgaggtgacctggctgttcatcgtacttctcgtttggtcatccagcccctgtgtgacgtcatcatagttatctaagaagatatatgccagcacggttctctcattttcgtactgcttttcaatctgaatctgttctgtcacatcaaagaaataaagcaggcgctcatctcttttaatcactactttaaacttccgctcattcaaggtgatcgtttccgaatcgacctcctgcttgatcagcggcacgacggcctcgcatgtgtcatacagcgaccgtccgacgagcgtgctttcattaaaacaggaagacaaaaacggattcgcccactcaatgtaatattgatcattaaacagcataatcccgataggcatttccattaatgcctcttcgcctacttttttcaatctatacgataacgtggagatataatcgtcaatttcttttctgatcagagaatccgcacgcttaatgaaaaacaagatcacggcgagcagcacaacgccgatggctcctatcagccagttaaagtaaatgctgatgagaattatgatgattgacaatgcaatcaatgcatagatgggataccgaaacaacggtttttcataaaaactaggcatttctatcaactccccacctgtaagtcacactcaatttcgcgtcaccttatttcttatgttaaagcctatgtcaatgatgcctaagaggagatacacggacaagatgagcggaaaaagcacccccagcacaattgctaatacaggaacggctttcggcatctccatttcgcggcaatagaaaaaaataaacgctaatccttgaatacaaatcagcaagctgagaataaatcccccattcaatgaaaccgaatacagcatatgccctttttctaaaggcagaaaccctaatatcgtcacaataaaatacagaatgacaacgctttgcgggagtttgagctctctaaaaggcttcatcttcggaagatcaggggaaaatcgccgtaaaagcggccttgccatagcataactgaggaaagaaaaaacgatgccggtcaatacgagcactgtcggaaaaagatgttgaaccgtgctcagctgactttccatcagcttgatctgcttcccgaactggtctccataaccgagctgctttgacatggtatcagccacagacagcgactcccgaagctgggacatggtggtatcaaccacattcatattaagaaacacgatgctgaccacaaaaaaaacgacgccgcacagcacatacgccatagcgccggcagcaaccgcatagccgggctgtttctttttaaaataatatcccatggcgattcccgtacaggccgccgtaaaagcgcctgtaagcccggtaaacgaacttacaacaaagctgacaggaaggctggcaagccccatccataccccgggcttcagaccgtgccgaatggtgtaaagaatgatcggcagcggcaaagcaaagaaaagaattgcccccagtaaagggaggtacacgaccaaaagggaaatgattgcaaaaatactgatcaaaatggcgccttctattagagcccttgtatttttcacttactcacctcaaaccttgtatcattcgaacatacgaatagaaaagagcagcttagacgactgctcttttgacgccgcaatgtctctttcaagacctgaattttccataaactctccaaaatacacgtatatattttaacataagtcgaaatcgcaagtaaaatgagcgcggacagccgcaatgttccatgtgaaacatgaaaacagacaaacggacatcccagtgaaagaatgcccgttgtatcagtgatcctgatcatccatgaaaccagaagtatctctgtttttctttttggtttttcgtacatataacaagacgataacgataagtaagagagtggtcgcctgcaaaaccccgctgctgaaaaggaagaagttctttatcatgtcccacatatagtttcacctctatttcgtatttcctttacattgagtttccctttctggaaacttcaaaacatcaggaacaacatcgggaccggggcatatgctgaaagtgaaaatgaaggataaaggagattcttacaccatgactgagcggagaacattagcatggcatgaaacgttagaactgcatgagttagtggctttccaggcaaacggacttgtgaaattaaaaagaacagagcgggacgtaagcgatgccagattaaaacagctttacagattttccatccattcgctggaacaaaatctgcgtgaactgcttcctttcttccctgaagctcccgcctttcgtgaggatgaaacagaagagcgcgctgattcctccttttacagcggcggcctgctcattctggccaaaacatctgtccgcaattatgccggagccattacagagacggccacacctcaattaagacacgtcttcgtcaagcacttaaacgcggccatcaagtggcaccaaatggtctttgagtatatggaagaacgcggtcaatatccggcttacaacctgagcgaattgctgaaaaatgatgtgcgcaacgccagaaaagccatcgcgatgaaataaaaaaaagcagcaaggaatttaatcctttgctgcttcttatttttgagcggactgatcttgaggagacgttttttcccggtatgcctcgagaaactcccggttggcatctccccatttcttcatttgcaaaacgatcggttccagcgacctgccgaattcggtaagagaatactccacctttggaggcacctgctgatatacctcgcgatgcacgatgccgtccgcctcaagctcgcgaagctgaagcgtcagcatacgctgcgtaatgctggggcaaatgcgccgaaactcattaaaccgcttttttccgccgatcatatgataaaacaaaatacccttccactttcctccgataacggaaagcgtcagttcaaccggacaaccttctttattcggatatatgttcatttttcatcctccatagtaccttttttgatactatatgctgattagcatctgacttacccagtattttactcgcaatcctctccacctctcaacaaaaatgcttctttttcacatcaatttttaaggttttgaagattacaccctcctcaagacgtgttaaactataaaaagattgtttacactacaaaaaaggacaaggagttattatggaaaaaattcttattttcggacatcaaaacccagacacagataccatttgctctgccattgcctacgctgatctaaaaaataaactcggcttcaatgctgagcccgtccgcctcggacaagtcaacggcgaaacacaatacgcgcttgattatttcaagcaggaaagcccgcgtttggtggaaacagccgcaaacgaagtaaacggcgtcatccttgttgaccacaatgaacgccagcaaagcatcaaggatatcgaagacgttcaggttcttgaagttatcgaccaccaccgtatcgccaacttcgaaacagcggaacctctttactaccgtgctgagccggtcggctgtacggctacgatcttaaacaaaatgtacaaagaaaataacgtgaaaatcgagaaagaaattgcgggcctcatgctgtcagcaatcatttccgactctctgttatttaaatctccgacttgcacggagcaagatatcgcagcggcaaaagagctcgctgaaattgccggcgtagatgcggaagagtacggcttaaacatgctgaaagcgggcgccgacttaagcaaaaaaactgtggaagaactgatttctcttgatgcgaaagagttcacgctcggcagcaaaaaagtcgaaatcgcccaagtcaacacagttgatattgaagatgttaaaaagcggcagccggaattagaagcggctctttcaaaagtaattgctgagaagaaccttgacctgttccttctcgtgattacggatattctggaaaacgattcccttgcgcttgccatcggtgatcaagcgtcaaaagtggaaaaagcattcaacgtgactttagaaaacaacacggctcttttaaaaggcgtcgtatccagaaagaaacaagtcgttcctgttttaacagacgcgattgcagaataatcaacacaccccggaaaccagccggggtgtttttttattgctcaatcatcagacggcgtttcgtaagcgctttctccgaaaattattttgacggaatttaatataaaatatacaatatataatatatcacatggaagacgttcgatttcctaattattgtaagttagcatcacaacatcagaatcgggggtgtctatcctggaaaaacacgctgctctttcttattcacgaacaacaggcatttggcttgtgctgacaggagctatcttatggggggtctcgggaacggttgcccagtatctgttccagcaccgccattttaatacagaatggctgacttcggtgcgccttctggtgtcaggggcgcttctgctcggcatcgcgtaccgcaaagaaaaaggacggatatgggctgtttggaaagacagacgggacagaattccccttcttttattcgggattttcggaatgttaggcgttcaatacacctacttcgcggcaattgagtacggcaacgcggcaactgctaccgttcttcagtatttagggccagcgatcattacatgctttttagcgattcgcgcaaagagaattccttcagcaaaagagctgctcgccgtcttattggcggttgccggcacattcattttggtcacgcacgggaatgtcggaagcctgtccatatccggtctggccgtcttttggggcatcagttcggcgtttgcactggcgttttacacccttcagccgcatcgtctgctgaagaaatggggatcggccattattgtcggatggggcatgctgatcggcggagccgccctcagcttgatccgcccgccctggaaatttgaaggcgagtggtcctttcctgcatatgccgcgatcgtgtttatcatcattttcggaacgctcatcgctttttattgctacttggaaagcctgaaatatctgagtgcctctgaaaccagcctgctcgcctgtgcagagccgctgtcggcagcttttttagctgtgatctggctgcatgttcccttcggaatatcagaatggctgggtactttgctgattttagctaccatcgctttattatctatcaagaaaaaaaaacctctcttttttagagaggttttttcctaggcccagagcaccccttagtctcaattacccatatattaaaaggccttttttcattttactatcatccaaaagaggaaaatagaccagttgtcaatagaatcagagtctaatagaatgatgtcgacaagtaaatcatgcaggattgttactgataaagcaggcaagacctaaaatgtgttaagggcaaagtgtattctttggcgtcaccccatacatattttaggtctttttttctgtaacaaacctgccatccatgaatgcaggaggatcgaatcggcagatcgcaaaaaaggtacatacaaaaggagacatgaacatgaacatcaaaaaatttgcaaaacgagccacagttctaacttttacgactgcacttctggcagggggagcgactcaagccttcgcgaaagaaaatacccaaaaaccttacaaagaaacgtacggcgtctctcacatcacacgccatgatatgctgcagatccctaaacagcagcaaagtgaaaaataccaagtgcctcaattcgaccaatcaacaattaaaaatatcgagtccgcaaaaggactggatgtgtgggacagctggccgctccaaaacgctgacggaacagtagctgaatacaacggctatcacgtcgtgtttgctcttgccggaagcccgaaagacgctgatgacacatccatctacatgttttatcaaaaagtcggcgacaactcgatcgacagctggaaaaacgcgggccgtgtctttaaagacagcgataagttcgacgccaacgatgaaatcctgaaagaacagacacaagaatggtccggttctgcaacctttacatctgacgggaaaatccgtttattctacactgacttttccggtacacattacggcaaacaaagcctgacaacggcgcaggtaaatgtgtcaaaatctgatgacacgctcaagatcaacggagtggaagatcataaaacgatttttgacggtgacggaaaaacatatcaaaacgttcagcagtttatcgatgaagggaactatacatccggcgacaaccatacgctgagagaccctcactacgttgaagacaaaggccataaataccttgtattcgaagccaacactggaacagataacggataccaaggcgaagaatctttatttaacaaagcgtactacggcggcagcacaaacttcttccgtaaagaaagtcagaagcttcagcaaagtgctaaaaaacgcgatgctgaattagcgaacggcgccctcggtatggtagagttaaacgatgactacacattgaaaaaagtcatgaagccgctgatcacttcaaacacggtaactgatgaaatcgagcgcgcgaatgttttcaaaatgaacggcaaatggtacctgttcactgattcacgcggttcaaaaatgacgatcgacggtattaactccaacgatatctacatgcttggttatgtatcaaactctttaacaggtccttacaagccgctgaacaaaactggtcttgtactgcaaatgggtcttgatcctaacgatgtaacgttcacttactctcacttcgcagtgccgcaagccaaaggcaacaatgtcgtgatcacaagctacatgacaaacagaggcttctttgaggataaaaaggcaacatttgcgccaagcttcttaatgaacatcaaaggcaagaaaacatccgttgttaaaaacagcatccttgaacaaggacagcttacggttaacaactaataacaacaaaaagaaaatgccgatacttcattggcattttcttttatttctcaacaagatggtgaactcaatcatggcacgaaaatggcccgttgtaatattgatctttttgggtgcgttcctgtttgtcggcttactgccgaacaaaagccacaattcctctgacacaaacacggagcataagaaggattaccgggcggcgtatcattttacgaccccggacaaatggaaaaacgaccctcaaaagcccatttttttcgaggggaaatatcattactactatctttataatcgggattacccgaacggcaacggcacagaatggcggcacgccgtatcagaggacttggtgcactggacggacgaaggcacggctattccgaaatacaccaacgaaaacggcgatatatggtccggttctgtcgtcattgataaacacaacaccgcgggcttcggcaaaaacgcgctggtcgccgtcacaacgcagccgacagccaaaacaaaagcccaggaacaatatttatggtacagcacggacaaaggaaaaacgtttacttcctatagtgatcagcccgtgatgaaaaatccgggaactaaggatttccgggacccgaaagtgatctgggatgaacaggatgacaaatgggtgatggccatggccgaaggcgaaaaaatcggtttttatgaatcacccgatttaaaaaattggaaatacacgggcggttttatcactcagcagatcggcctcgtcgaatgccccgacctttatatgatgcgtgcagatgacggaacagccaagtgggttctgggcgcaagcgcaaacggcaaacccgcaggcaaaccgaatacgtacgcgtattggaccggaaactttgacgggaaggaatttaccgccgatcaagaagaaccgcaatggctcgattacggctttgactggtacggcggcgtcacatttgaggacggtaatagcgaagatcctctgacaaaacgctatgcgctggcatggatgaacaactgggattatccgaatgaaacaccgacactaaaaaacggctttaacggcacggattctatcgtccgtgaaatccgccttcagcagcaggaaggcggcacatacagcctagtgtcagagccggttgaagcattgaaccaattaacctcttcaactgacagcatagaacacaaacaggtgaacggttcagagacactgccgatcacaggtgatacatatcagcttgatatggatatcgcttggtcagatatcaaaaatgcaggcgtcagactcagagaatcagcagaccaaagtcggcatattgatgtcggtatttcggcagaagacggctatgcctatgtgaacagatcgtttacagaccagcctgataaaaccggtgcatacgccgaaagcaaagccccatttgacggaaacaaagggcgcgtccatctgaaaattctcgtagacaaaacaagtattgaagtatttgcagacgacggaaaaaccgttttgacaaatgaagtgttcccaaaacacgaagatcagggaatcacgctcttttctgaaggcggctccgctgactttcagcatattgagatgaagcatctcggttcgattcattcttagacgtccctcttcatttctaaccagcgcccggactgtggtaaaatgcaaatatgtatactacgattcatgaggtgttccattggataatcaaaacaaagaacctgtgctgaaaagaaccatcatgcgggacgaagtgtatcgcacactcagaaactggatcataacgggcaagctcaaaccggaaacaaagttaaaggacaaggatttgtcggaaacattgggaatcagccgcaccccgatacgggaagccttattgcggctggaagatgacggcttggtgataacaaaagcgaacagatggacgcttgtcgctccgattgagttaaaagaagcggaaaacttgtattccatcgtctggacgcttgaaaaactcgcattgcagcaagctctcccgcatgtggacgatgccgtgattcaggaattgaaacagctgaatgaaaatcttcttcaaacaatgaaagacggcgataaactggccatcctggaagcggacaatgcatttcaccatcgcatcattctgcttgcggacaacgccgaacttcacaaattgcttgtaagcctgaaagtcaaaattcagagaatggaaatccgctatttcagtgaaaacggcgctttaaacagatcatataatgaacactctgatatcattcacgcattagaacagcaagatgccgccgctgcttttacagcgcttgaagcgaattggaaaaacagtttagaacggctgcagaacatggcatagcaaacgaaacagccaaatcactcatatgatttggctgttttacggatatcacaagacagccgcgttggctgtcttgtttactttttgtttatatataaatacataccgtaatccgtcggcacagaagcataccccatctgtctgagcatggctgttatattcccgcgatgatacgttccgtggttcacaacatggaggatcatatcggccgctgcggttttcatgatgtctcctgacggatgctctatttcaagggggagactgatattttcttccttttgcaaaaataattgatatcgatctgataattccaaaaacatatcttccagctcttctatctctttagacaagatgtcctctttttgctgttcagctgatttcagcgtatcctccagacgctctccggagaacacatcaaaccaccccttatccgacagatacacatgagtcaatacaccggctatcgacggaaagacactttgaatctccttacggtacacatcctccggaagctctttaagccgggtgaatatttgctgatttgcccaaagatgataatcatacaattgcagtgccagatgtcccacattaccctctcctctctcgatatagaacgtacgttcctcattatactacactacatgcggctttgtaccatcttcttcattcgcagctgagaaaatccgataaaagccgaaattaataagaggaggcctgcgccaatataaataaaccgcacgccgaatacatccgagatgacccccgttccgataatggaaaacataaaaataaactgaactaaagctgatctcgccgctaatatattgacccgtgtcttctcggtcgtgatgttttgaagcaatgtttcctgcgcgagatctcgtaatacacaagccggccccatacacagcaccagaaaaagggccgtaacggcacttgtgatcaacccataaataaacgtgaacattccatatgccaaggctcccgtcagcataagcggaatgagatgatgctgaaactgaccggataacttatagatgatcagtccgccgatcatcgtccctgcataatagactccgttgacatacccccaccaagcctctcctttatgaaggacgtcatgcacataagtcaaggacacagacccgatccatatcatgcctgcccacgattcgatcacatccatcacaatgagaaccctcagctgcttttgccgaaataaatacacccagccgcttgccgcatctgcaaaaagggaacgttccctgactgctgccggcgcacacatgcgtacttgaagaaacagaatgatgcccaaaaccgaagaaaccaataacatgacagtgacgatcattgtatcgctctctcccaagaacgctatgatgacgccgccgagagaccaccccgcaaactgaacggtctgatccgccgcagataataaaccgttcgctttcgcccttcgatcaggaggaatgatttccccaatcagcgcgctttttatcggagcaaaccatccgttgcaaaaagaaatgcctccgatcagacaaaacatcagaaaaaagaatgcggatgaaccggtttggatgacaaaaaacaaacagactaacagtgtgatctgaatcaattgagaaccgattaacaaagaccgaagcgtgaaccggccggtgaccagcggcaaaacggcgctgcccaatacgcgacatacaatgctgacgaacgtcataagagaggccatcgccgtcgaaccggtttttgtaaacaaaaacaagatgacagccatcgtataaagtgagaaccccaagttgatagcggtctggctgtataaaatagcgtaatatgccctcttcatattcatcttctcactccctgattatgtaaatcataccatatttgctgatcagctctctttttttaaaaaaggtaggtatggagtcaaagctggctgacatcgaaaatgtcattaagattccggacaaaaacaaaagccgatgcgcgcaggcatcggctttcaaattaacctaaacattatttatcaccaaacgactcaagaacaagcgacacaaaagcttcagcggccggaagctgccattttttctttttgaccagcatatgagaataaagccgctcgaacggctcagactgctgaagaattttcagcttccccgcttttacctcttcttttaccgtaatataaggtaaaacggagaaaccgagtccgctcatcaccgtctgcttaatggcctctatactccaaagttccattgtttgtaaatgactgatatcatgtttgacgagaaatcgttcaaacatagtccgatagctgcatccttcttcatttgtaataaaaaagtgcttgccgctttgttgatagtcgtcaaaatgttccggggcgtcattgcccgccacgaggacgatgcgttcctccaataaagaatgatgtatgcatttttccatttgtatctccggatacaccataaatgcaatatccacgcggccgcttactaattccacctgattctgcccgcatgttccgttgctcaatatgatattgacgttcggatacttcatggaatattctctgataatcggccccagtctggaaatggtcaaagactccggcgccgcaatttttaaaacgcccttcacctcgtgaatgctttgcatatttttgatcttgtcatgggcggaaagtaaatcctcggctaacggtatcagctctctccctaaaggcgtcagtttcagacgccttttttcgtacgtaaataatgcgccgccgatctcctgttcaagcgcctgaatatgagtcgtaatcgtcgactgcgtgtatcccagcttcgccgcggcccctgtatagcttcccttatctacaatggcctgaaatgtaataagatgtctgatctccatatgaattcacctctaagatgtatcgaaaaaatcaataatgcgattttatttttcaattttatttataactattcttatcatacaataaaaaacggttccatcacattagcaaatgaaggtgatttaatgagtatcatagcttttctttcttatgtcctgatgacatctattacgcccgggccgagcaatattttaatgatgaatgaagcgcgcagagccggctttatcggttcatggcgttttaacggcggaatcctgacgggatttgcagtgctcggcattctcagcggtctgttcacaatgagtgtttatcattggattcccgtcgtggaaccttactttaaaattgccggagccgtctatttgctctatttggcttggcagatttcgctgcccaaaacatcaaaaggcgattctgaaaaaacccgatcgtcttttctatcgggatttctgtttcaaatgatcaatataaagagtattttattctttttaaccttaatgagcgcttttatattgccatttcagcacacgtatccattgattgcgttctggctcgcgtcggctattctcctgggctgggcggctttactgctgtggtcggcattcggctctgtttttaaacatctctttgagaaacacgataaagcgtttcgcatcttgatgtgtctgctgctcatctattctgctgtaagcatttatctgtaattcaaaaaagataaacgcctattggtgtttatctttttttcgtttcgtcaataatcccagccagactgaaacggctgctgaaacggcagaaagcgccgtaatcatgacggcaatgccgccccagccgaattggtgatagaaagcgccgcttgcagtccccccaatgctccctcccacataataggaaaacaaatataaggccgcggcctgtgccttatcgcggacggccagttcgccaacccagctgctggagatcgaatggcccgcaaaaaagccgaatgtgaaaatcgcaactcctaaaatcatgatccctatatcagcagataaagtaatgcagacaccaatcatgacaatcaccaatgagaatggcaggatttttcttttgccgtatttgtctgctaacatgcccatccacgttgaactgaacgttccgacaaggtatacgagaaaaataaatccgactgccgtttggcttagtgaataaggcggcttcatcaattgaaaaccgatatagttatataaagatacaaagccggcttccaataaaaaaccgatgatcaaaaggcagccgaaaccgggcgtcctgtattgacggtaaaatgaggtgaaaatgtcgtttcttttatatgtccggggcgtaaaatgagaagaggcaggaaggatcgtccagaagataatacttgccagcaaactgatgaggccgatcgtcagcaaagccgtatgccagctgaaggaatccgtcagaaagccgctgatgatgcgtcccgtcatgccgccaatcgaatttccgctgatataaagccccattgccattcccaagctgtccggctcaatttcttcagctaaataagccattgccgccgcgggaagccccgctaatgcggctccctgcagcgccctgcaaacgacgagcagctgaaagtccgaaacaaaccctgtgagaacggctaggacggatgcagcaaataatgacacgcccattatctgcttccgcccgtacatttctgataaaaaaccggcgaataccagactgatggctaaagcaatcgttgccgctgattggcttaagcttgaaaccgccggtgacaggtgaaaatcgtttgcgatatcaggcagcagcggctgcgttccccaaaggatggcaaacgtgcaaaatccgccagcaaacaaagcgaagtttacctttttgaattgaagtgtgccgcggcgaatgtaagtcatttatcttcccccttttctgttaagccgggtttgaataaacgctataaaattctccgctgccggcgataaatagccgtctttcctccaagccaaaccaatctctctttcacagatcggattggtgacactgagaagtttgacctttgttttatcaaaaacgtgcaagtcagggataagagacacccccagtttagcgccgactaacccggaagctgtcacaatatcttctccctcaaatacgacatccggtgaaaatcccgctttttcacacaactctttaatcatgccgtgaagaacatttgtatctttaaaagagataaacggttcatgctccgccattttcaaatcaatttcatcatatgaggcgagcgggtgttcagcagaaacggctaaatataactcttctgttaaaagcggctggcagatcacctcatcgttttcatcacgaagcgaagtcaatgcgatgtccacttctcttgacgttaattgctcgataatctgctgatttgatgcttgggtcaactgaaaattgacatgaggatacatgtgttgaaacgagctgatcacatccggaaccatactcatgccaagcgacggcaaaaaagacaacaatattgtgccgttgttgggatggatttcattccacacttcctgcttaccgatttcaatttgtctgatagattgttccacacgatgcaaaaacattttcccgtaccgattcaaataaatattcctgcctttgcgatcaaaaagctgaacgcccagctcgtcttcaagctttgaaatcgaacggctgagagcgggctgagatatggacagctgttttgctgcctgtgtaatatgctgcacttgcgccactgtctgaaaataattaatctgatgccaatccattgattgcctccgcgatttgttattttcacttatcatacgttacccgatctataacttctaattgttagtttgcatgaaactgatgcatataaggaatgattttcaaaacagaataaaaaaagagggcttcctttccggaagccctcattccgtctgctacgccaataaaagaaaaataagcgctaaaacagccggaagtccttgttttacgataattgatttgtttgaagtaaagcctccgaaaatggccgcgatgaccacgcagatgacgaaaaacatttgaatcatatggccaatcggatcagctccgaggatcagcccccaaatgaggccggcagccagaaatccattatacagaccctgatttgcaaacatgaccgctacattccgatcaccttctaaatgcttcggcaatttgaaggaccgcttagctgccttcgaattgataaaaaacatttcaagtatcatgataaatatatgttctaaagctacaattccgacgaaaacagccgcaatcatgtccactgtccctctcctctcagcttcacttcaaccttatttccattgtgcgattgtttcgataggaagacggtaggaagcatatccttcgtctgccgcttttccgattgataacagcatgaccggtacataacgctctttatccattccgaaaacctcggcaatcttttctttatcgtagccgccgatcgggtttgtgtcatagccgtgcgcgcgtgccgtaagcatcagctgcatggaaacgagtcctccgtcaatcagaatcgtttcacggttcacttgctccggcagtttttcaaaatgcgccgtcaacgcagcgatttgtctgtcttttacttcctgcggcatgtagcccagttcgaccgcttttgaataaatttcttctaaatagtcatcactgttcatatctgcgaaaaccgcgatcaccgcagatgatgtgctgacttgtgtttggttaaagctggcaagcggcgcgagtttttcttttccttcagggctgtcaatgacgagaaaacgccacggctgcgcgttgactgaagacggcgctgtcgttgcttcttccaggatttgagtcatttcttctttgctgattttaacagccggatcataattccgaatggaacggcgccctttcataatgtccataaagtcgtttgttttcagttctgttttcatgtgtaaaacactcctatgctttcatattttctatattattctgcatctgtgacaatacgttttttaacatactgcgttcttcctcgctgacaccggcaagcatttcctttatgaaacgctccttctcctttttggaagcctcgattctctcccgcccctgttcagtaagccggacaagtataattcggttgtcctcgggcttccgccttcttgtgaccatttctttggcttcaagctgtttcaagtgtcttgtcacggctgcgccatcaatattcacctttttctgaagatcgctttggctgatctcatcgacgtaaaaaagcacggcgagaagctcaaggcgggattggctgattccggtgcacgcttcaaacttcgtgccgatcactttatgcagtgattggagctgatataaaatctcgccttcctctgaacaacatgctgtcaaaacccatccccactttcttttgcgcaattaattgactagtcaatgtttgatatatcaataatatacagccgtcattctatttttgcaagttttttctcctttattaaaaaaagctgccgattaacggcagctcgcttcttaatgattatggacttttctgaaattactgccttttacttctgcgacatcatataccgtcacaaaggcttgtttatcaatgtcattaataatttctttcagtttggtttcttccaaacggttgatgacacatgtgatttcttggaatttttcatgagaaaaaccgccgtatgcttctttataagtagcgctccggcccaattcttcacgaatggtctctaccattaatgcaggctcattggtgataatctgaaatgttttagaaccgcttaagccttcctcaaccacatgaatcaccttagaagcaatgtagtaagcaatgacggaaagcaatgcgccttgcagcccaaatacaaaagaaacaaaaataaacacaaacatgtttaaaaataaaatgaggtcgctcgtgccaaacggcaatttccgtgacagaagcacagccagcatatcaattccatctaatgcgccgccgttacgcaatgccaatcccattccaaagccgagaataatcccgccgacaacggtgattaacagggtgtctccctcgatgatagccggtgtgtggtggaaaaaactcgtgcccgcggcaagtgagacaataccgataattgatagaaacgcaaaacctttcccgatttgcttatatcctaaccagacaaacggtatattgatcaccgcaattaagatcccaagaggcaaatgaaacagctgtgaaccgacaatgctgagtccggttacaccgccgtcagatacactattcggaatcaatacggtttccagtccatacgcggcaataattccgccgatgatgaccatgatggcccgtacgattgatttcactctgaatttcttacgtctttgtttttcgattgtactcatatcattccccgcttcaattattttttcttatttaaatataccataattgatacttttcgttaaaaataagcctatcggctatgttgaagcaggaaccgaggaaggagatgtcacagataacgtatccatttatgactttaatcattcacaatgtaatcattcacaatgtaatcattcacaatgtaatcattcactaaaaggaattaatgaccattaataatctcttttattccccttcttcacatattcccaatcatgttctatattttttctcacccgctgaagaaggctgaaaatggtttctttttcctcagatgtaaagccggacagagctacctccgcagaatgctctccttctctttgcaataacggataaacctttctccctttttcagtcggaaacagtttttttatttttttattttgatcatcaggacgcttttcaataamcccctgtatttccagttttttgattgccctcgccgctgttgttcggtcgactttaatcatttccgccactttttcctgtatcactcccgggttttcacatatacgcacaagatagagatactgcccttttgttaagtctaattccttaaattcaatattgctgatggaatccagtgcccgtgcgatcatgccgatttcccgcaaaatatcagtcatatcttttcaaacccttcattttttgttgcatttacaatataattattttatcgttacttctataagaccacaagcaagccgtgcagtccagactaacatgtgaaaaggattggttgattatgaggataaaaagaataacaacggaaattgatttacaagcagcgcttgagattagaaaagcagtattcattgaggaacagcaagtacctgaaaccgatgaatttgatcagttcgatacgcttgaggatcagtgcgggcatgtcttggtttatcatgaaaatcagcctgccggcacaggacgcgtccgcatcgtaaaccatacaggcaagctcgaacgaatctgcatcctgaagccttaccgtaaatacgggttgggcaaagtcatcataagcgaattagaaaacatggtaaaagaaaaaggcatcacccaatgtaaactgcatggacaaacacatgcggaaggcttttatcacaaactgggctatcagacagattcaccggaatttatggaagacggcatcccgcatgtcttgatgacaaaagagctgtgagctgtcactgaatgagcagccaaacggctgtatgaattatttaccgaaagccttgtataaaggctttttttcttagcctgaaactcaaattaaaaggtatgtgtgcgcagccggtgcttgtcacaaatggccgccacaaaaaaatcaaagctggaataaaactaccaattttagcttttaatctattaaaaattaacagttaaagagattataaaaaggaagaaaaccccaaattatacaagaaagactgattctctctaatatggactgctgacgcgttacattttttctatcttcacatatctttaatactaagtacgttataaatagattccaggaggagatatgaagtggaagaaacgagtatggagccatcacggctctgcaaagaatttgctagaattctcaattcaacgcccagtgtcgtaaatggcgtatgtacggcgacaagatttcgaagcaacatccatccggtggtactcggaagaagagccgaggcatttccttttattcctcaggccttttcatttgaaagcatggatcgggaaggcagagctttatgtttaggtgagactgttttactgcaagaagaagtgaacccgttaatgagtgagctgcgcaaattcggtatcatcgtaactgccgttcataaccattggctgtttgataaaccgcgtctgatgtttatgcatttcgaatcaattgataaacctctcaattttgcaagaaaagtgagagaggccctgagggttctaactactaaaactgtgcgtgcggtaccaaaaactgacggggaaatgattgaacggcatggtctttgtgacgaattcaacgatattctaggcggaaccatgcatacgtttgaaaatggaatttgtacagtaatgagatcacgaacgaatataaaaccagtagtactgggacggcctggaagatcatttttgctcattccgcaaatgttttcatttgaatcaatgacaaaagacggccgtgctctctgcagcggagaaactgtcattctgcaaaaagaaatcaatccatttatcagcgttcttcggaaacatgatctgattgtaacgtcacttcacaatcactggctgtttgataaaccgagactgatgtatattcatttcgaagcgattgataaacctgtcaacttcgccttaaaagtgagagatgctttaaatgtgcttactgataaagaggtcaaagcttagcatgtttcgaagtatcaaaaagcgattaatataatcgcttttacatatgatcaaccgaaaaacaaaaaggaggtcagacattttaatgttaaaaaacagccttataggctgtcgttttgtgtatattctattgatgagtttatactaattcaacccgcattccatacaagctctttatttctcaatggttttctacatgtcgttgtgcaaacaccttcttagccactgaaagagcattaagtacacgcgggaagcctgtataaggaaccaattgggtgatactctctacaatctcagtcggtgttaatccggatgtaagccctgtattgatatgaagttcaagctgcggctcggttccttgcgttacaagggatgaaatggtaacaagcgcacgttgttgattggttaatcccggtcgtgaatatatatctccataagcaaattctatcatgtacttacttacatctggggcgatatctttcaagtcttcagaaatttttaaatgcgtagagattttatcatcgcttgttaaagtgtactccattaatttgtctaaaccttgttggtaacggctttgatccatttgaatttcctcctgaaaagtacttattttctgacataagataatatatcgcagccctctctaaccgtaaaatacataaaaactataaaaaccattcatttttttcatgagttatcttgatttacgtaattactcttacaaaaaaatgaaatataccggataaattcgcgtactgcgtgcgaaacgtattttcctttttttgaaataatcgccactttccaaggaattgatggattaacaatggagattgccttaactaaactttgatcagtctttttcactatagactgagggaaaatggagatacctagttcttctccaatcatttcgctgataaaatcccattgagaactttcataaacgatatttggacgaaaaccggctctaatacactcttgaataatccgatcgtgaagagaaaagtcttcactaaacaggatgaaaggttcatttttcaagtcttgcatttccacaatctctttatgaacaagcgggtgagcggaatgaacgaagagcatcagttcttcattaagcaatggaatgatatcaaactgctcttcgtccactggctcaataaccacgccaagatccagtaccccatcttcaacctcctgtttcaccttgtttcccccatgttctatcagcttgatgttcacatcaggatacaattgtttaaatcctctaatgattttaggaaaaaacaaaacaccgataagcggcggtattccaattttcacttttcctttttttaaatgtaaaagatcgtataagttcgtcgacaagtcatctattgacttcataatcatttggccttgctcaaatacaatttcgcctgcatctgtcaaagcgatctgtctagctgatcgatcaatgagctcaacctttaattcctcttccaaacttttcaccatcttacttaaggcaggctgtgacaaatgcagattttctgatgccttagtaaaactgttggatttagcaacttcaagaaagtaagtgatttggcgtatatccatcgtatgacctccattccataagtttaacgaatacattatattctttttattcattttacttatacaactgctgggtgtaaacttttaggagaccaaaatgaatcctggaggggttactatgagtaaattattggaaagtaaagttgctcttgttacaggcgcggcgagtggaattggtttagaaattgcacgtgaattcgctaaagaaggcgcaaaagttgtgatttccgatttgaacgaaaaagccgtgcaacatgcagctgaggaacttacggaacaaggatacgaagtcctctctgcggtttgtgatgtaacaaacgaagaacaagtagaaaaaagtgtctctaagacacttgaaacctttggacgattggatattctggtaaacaatgcggggattcagcatgtgtcggatatagaaaacttcccgactgataagtttgaatttatgctgaaattaatgcttactgctccttttagtgcgacaaaaagagtattccctttgatgaaaaaacaaaaatttggccgcatcatcaatatggcttccataaatggtttaatcggttttgcagggaaagcggcttattgcagcgccaaacacggtttgatcggtttaactaaagtatcagcattggaaggagcggaatacggaattaccgtcaacgccttgtgtccgggatatatcgacactccattggtgcaaaaccagttaaaagatattgcagagactagaggcatttctaaagaaaaggtgtttgaagaagtcatttaccccttggttcctcaaaaacgtttattagccgtgcaagaaatcgctgattacgcagtattcctcgccagtgacaaagcgaaaggagttacaggacaggcagtcgtaatggacggcggttatacggcccaataatctgaaaaagcgctattcttcatctgtagatataagaatttctgtgaatgatttactcttcataaaccaagccgatgttcttctaggaaagacatagccatacagattgaagtttgaataaaacaaggagggcaaagattaacctttttttaacattttgcatcttaacttaagaaaagccgctttgttagcggctttttactggtttccatgagggggaagaagcatttgaaaaagcgaaacgcgaaaacaagccgattcttgtcattgatagcttgtctctttctattaaagtaatcattatatatttatctgcttgccaattccttaatcatcaaacccaattcataaattcccttttgaaggtcttcaagagatgcataagcatatgataagcgaatataattccctttttcttgagcatagatactgccgagattgagaagtatcccttttgtcaaagcttttgtataaagtaatttcatagatagtgaaggcaatatttttacccagacaaagaatcctcccttcggcatattccatatagcgacattcttcaaattggtttctaagagactcatgaccaattgccttctcacctttaattgacttctcacctgttctagatgttgctggtattcaccggatgtaaaccactctgccgctactctctgagataacgaactggagccgtaatctgtttgcatttttatgtcggataaacgttcaatcactggttctggaccgacgatccatccaatcctcaaacccggacttaacgttttcgataaactgcctatgtaaagcacatgcccatttttatctattgttttaataggatctggaggaatctcatctatccataactcacgataaatgtcatcttcaataatgggaagctgtgcattctcacttgcggcaaggatttcttctcgtctcttttttgacattaaaatacctgtcggattatgaaaacaaggatttgtatataagatagccctcccccgctccccccttgccacgtggatatgttccggcaaaagcccatcgttatccataggaactccagtcagcttcataccggctgattgaaatacgtgtaatgaataaagataggacggctggtcaagataaacggtcgatcccctttgtaaaagccccattgatataagctgcaaggcttgcagtgcgcccgaaacaataagaatggaagaaggagacgcttgaatgccgattgttcttaaatagccgcttaatgcctctctcaaaggcaaatatccttttggttcctcatacccgaatgcctctatgttttgagatacctttcccatgatctctttcataacagctaaaggaaaaatctcatgtgaaagttctcctttactgagctgtataagatcagaatttgattctgatttattgatctcttgaacgattttttggctgggctgctggattccggaggttacatactgatcccaatcgggagcggaattcttagccaaaagtgtccatgtattgttcgtaacaactgtccctttgcccattctgccttcgattaatccatccgccgtcaattcctctaaagctgtaatgactgtgctcctgttcacctcaaagtgtttagcaagcgtgcgctggcttggaatcttacttccaatcggccattctccatttcctattttctcttttataaattgaatgatttgtatgtacttaggaagctttttcatctttttttcttctggagctctcataaaaaggatcctccttaaaaactaaagtggttgggtcaaaatctatttaactggttgaagccatatcatcaaatctttattaatatagaaccacattaaataactggttggtttttgtaaagaggagtgagaaagatgagaaagaaaacagttcgaatcggtatatcttacagtctgatgattgggttgtgggcatcagctttcccgggaattcgagcgggtttggagagttacacgccggaacacctcgctttgtttcgcttgttgattgggtcaatggcactgttggtttttgctgttttgactcatatgcgtttacctgacatgaaggatatccctgctattttatcgttaggatttttaggttttgcactatatcacattttgctgaatatcggagaaaaaacagtcagcgcaggggtagcaagcttactcgtgaccatgacacctattttttctgcaatgttatcccgtctgttttttggtgaacattttgggctttataaatggattggctctatcataagtttattgggtgtgtcgatcatttcatttggggcaggaaactatacaaattcagtgaacggcattttgttaatcctgctggcagctttttcggagagtatttatttcgtttttcaagctcgctatataaaaaaatatggatttattccattcgttacattcactatttggggcgggacagtacctatgcttgtgtttctgcctggcttaggggaagagtttttgaacgcttcaatgaactcaacattgtctatcgtttacttaggtttattaccaacggttgtgccttactttgcacttgcgtatgtaacttcactcgtcggtgcttcagaagcaaccatttcactttatttaacaccagccgtagccttggccatttcttgggtgtggttaggggaggtgcctgcgtttattgcactgacaggcgggatggttacagtcgccggagtgtgtttcacctatctaacagtaaataaaacgataaagattttaaatccttatttcttatctaaaaagcaataaggtggatgaagtttaatcctgaaaatagagtcataagcagttctcctttttaatgacttgggtgtggttcacaaagttgagtgtatgaatttttttagaggattgtggtatgttaaacatacaaatattaatagaaagaaggtgagcccatgccaaacaatagtaaacccaacagtttaatcatggagaagtccccctatctgctccaacacgcccacaaccccgtaaactggcatccttggggaaaagaagccttcgaaaaagcaaaacgcgaaaacaagccggttcttgtcagcatcggctattcgacgtgtcactggtgccatgtaatggcccacgagtcctttgaggacgaagagatcgccggtatgttaaacgataaattcatagccatcaaggttgatcgtgaggagcggcctgatgtggattccgtgtatatgagaatctgccagctgatgacggggcagggcgggtggccgctgaacgtgttcgtcacaccagatcagaagccgttttatgcggggacatattttccgaagacgagcaaatttaaccgtccgggctttatcgatgtgcttgaacatctgtccgaaacgtttgcgaatgaccggcagcatgtcgaggatatcgccgaaaacgccgccgctcatcttgaagtcaaggttcacccggccgagggcatgcttggcgaacaggcggttcatgacacgtatcgccagctggccggcgggtttgatacggtgtacggcgggttcggccaggctccgaaatttccgatgccgcatatgctcatgtttctgcttcgctactacagctatacgggcaaggaacaggctttggccggcgtaaccaagacacttgacggcatggcgaacggcggaatttttgaccacatcgggttcggattcgcccgctactcgactgataatgaatggctcgtgccgcattttgagaaaatgctgtatgacaacgcccttctcctgaccgcctatacggaagcctaccaagtcacgggtaatgagcgctacaaacagattgcgatgcagatcgtaacgtttattcagcgggaaatgatacacgaagacggcagctttttctcagctttagacgctgataccgaaggccgtgaggggaaatattacatatggtccaaaaaagaaatcatgaatcttctcggtgatgaactcggcccgctttactgcaaggtgtataacatcacagatcaaggcaattttgaaggcgaaaacatcccgcacctcattttcacgcggcgtgaggccatcctcgaagagaccggcctcaccggacatgaactggccggacgccttgaagaggcaagaataaaattgctggaggcccgtgaaaacagaagctatccgcatacagatgacaaagtgctgacctcatggaacgcgctcatgattgccgggctggcaaaagccgcaaaggtatttcacgaacctgactttctcagcatggcggaaacagcgatccgctttctcgaacggcacctcatgccggacgggcgcgtcatggtccgctatcgcgagggcgaagtgaaaaacaaagggtttgtcgatgattacgcttttctcatctgggcttatcttgaactgtatgaagcgggttttaatccgtcttatctgcagaaagcgaaaacgttatgtacaagcatgctggagctgttctgggatgaacggcacggaggtttcttctttacagggaatgatgccgagacccttcttgtcagggaaaaagaggtttatgacggggccgtgccttccggaaacagcgcggctgccgtacagctgcttcgtctcggccgcctgacgggtgatatatcactgattgaaaaagccgaagcgatgttttccgtgttcaaacgggaaatagaggcctatccgagcagcaacgctttcttcatgcaaagcgtactggcacatacaatgccccaaaacgaaatcgttgttttcggaaggaaagatgacccagacagaaaacgtttcattgaggcgcttcaggagcatttcactcccgcctatacgattctcgccgcagaacatccggaagagcttgccggcatttctgactttgccgcgggttatcaaatgatcgatgggaggacaacggtctacatttgtgagaatttcgcctgccggaggccgacgacggatattgatgaagcgatgaacaccttacaaatcagcagcagagcctaggcggcctgctgcttttcttttttcacaaaacggaacgcgagccatacgaagatgatattgatcaccagagtcgatatgcaatcatatatttcatagccgccggctgctgttgtaaatatcgacggaatgccgccgtacaccgaatgatcctctgtgagaaagataaataaaaacatattattggcagcgtgaccgccaagggacatctccagactgcccgttttaatcgtgataaaggtccagatcatgccaatggtgacatatccgattcccgcccagagagccccattatccatctccggattcccgaaatgaagtgcgccgaataatccgccgataatgactgtcagaaccaccgcatttgccgtcaattttccggcgaactgaagcagaaaaccgcgaaagagaaattcctccgcagaggtttgaatcggcaccaacaagacggccgccgctaacagcagcagaaaacgtgaagcatggaatccctgaagcatgaaacgatccggatgaattgtaaaatcaatcagccccgcgacaaacatcagcacaacatatgtgccgaatccaaagaaaatcctcttccagttcagcgactgatttggtgtgatgatggataaaaaccgccgtttcataatgaaacgaaccgctatccaaatgcccggaatcgctatgaaatagacgatatgctgtaaataaatatccgccagcgggtcacttaatgccccctcatcccaatttatcgtcagtgaaggattgaaagcggacgtgagaaacatataaaacacggtcagtatgcttccgaaaaagaacaaacccacaatgaccaacagagaaaggatatatctcgatacactattttttccctctgcgggccgtacaaacgtattcatatttatgcatcaacttcctttccttcaacattttacaatataaacagaaacagatataggaaatgttatatattttaagaagaaagcgctatgccgtttcctttggctctggttatttacactctgtttttgccaaaaaaagacctttataatgtattcgtcagataaattaacagtattttctgattacaattgcaaagtcagggggttttttatgaaacatcagacattctcaaatgtagcgaaccgattagaccgtctccccatttcgcgtgtgcactatcaagtattaaccgctctcggaatcatctatttttttgatctcgctgatctgtttacgctcagcaacgtggctccggcgctgattgagcattggggcgtgaagctgtccaccattgccgacatcacggccgcatccttcctgggcatgtttttaggcgcgtccatcggcggaaggctgtccgatcggatcggcaggaaaaaagcgctgaattgttttgtccttgtcttttcgatctcatcttttctgaatgcgctggcatgggatattccgtccttaatgattttccgcttcttgaccgggctcggcgtcgcggccgccatgattgtgacgaacagctatttggcggaattttttccatcctccgtacggggaaaatacatctccctttgcgccatgatcgggctaatcggcgttcccgttacaaacgttgtttccgcttttgtcattcctttaggctcatgggggtggcggctcgtattcgtatggggggcggccggactcatttatttcttttttatccgccggcttgaggaatcgccgcgctggcacgaaaatcggggcgcatatgatcaggcaaacgccattatgaaccgtcttgaagcacgtgcagagaaagaaaaaggcccgcttcccgcgccaaaagaggcggcagaagtacatacagtgaagcacgcaggctacttagggctgtttcagggcaggaatttaaagatcaccatcatcctgtcagcggtatggattcttgaaacctttggcttttacggctttgcttcatgggtgcccagcctgctgaaaagcaacggcatcaccatggaaaaaacgctgtggtacaatgtgcttcactctgtcggcgcaccgcttggcgcattgctcggttccatgatatccgagacgttccaaaggaaatggattctggccgcaagcgcctttcttactgccattgccggactgttatacggcatgacgtttattcccgtcatgattattgtgtttggatttgtcgttaacgtcacggaacggatcttcacctcaaacttatacgcctacacatcggaaccgtatcctacggaatatcgctcggccgggagcgggctggcgtatgggctcggccgtttttccaacatattcggctccctgctcgtcggatttattgccgttaagctcggctacatcagcgtctttttgttcatcggcggctgctggcttctatgttccgttttgttaatcctcttcggcccgaaaacaaatgcacagcaaatttaatcaaaaaaacagtgcggaatcactccgcactgttacactgtgatttctatcaaattgccttccccatcctctatcacgctctcataatatccgtcacccgtcacgcgcgggccgcttacaacctgaaatccatcgtttttaaacgtttccgtcaattcattcacccgctccttgctgcctgtagaaaatgcgagatgcgcccatccggtcatattctgtgccggagcttcatcaatgccgccttttttcataagttccagcctgcatccggagtcaaatgaaagaaaatacgatttgaaatcttttttctcattatgataaaggtcattggccttggcgccgaagtatgtctcataaaactctttcatccgttccaaatctttcacccatatcgctgcatgttcaattcgcatatgtccgcctccctttttttctcaatctatttataaagcatgaaacccatttcagctcaagactttttccgctgaaattgatgcataatttgttttttagctgtttcttcgtgaaaaaacaataaaaatgcttcctttccgacccgttccaaatgaagttccagggatggaatattcaatgcccggctgacgctcagatttccctcgccgatgatctccgcgtcccatttctgttctttcgcaaactggtacaagccggcagccacgtcatcactgtgcgcatagatggccgtcggcgccttgtcgaaaccccagaagtgctcacccgcacgctttccgtcgtccatatcatggcatccgaccagaatgcgggtttcatcaagagagccgaaaaccgccttatatgcggttaccttgtcggccgtactcgggcttttttccgcttcccgcacacatgtaaaagcaacgtcttgatgcccgcggtttttcaaatacaaaaagctttctctgtatgctgcctgcctgtcattataagcgcagggaatctcttgatgctgtgtatattcacaagcgacaatgggaccgtattccaggtaaggcacggcggtttcccattcattcgcccgggacgtgacaatcagtccgtcaatctttttcattttcagcagttcgaaatatgtcatctctatagcggggtcatagttggtggggagaagggttgtcacgtaatcatgggcaaacgcttccttcgtgataccgtttacaattttgtcaaagcagggatggtcgctgtacggcaaaatcacgccgattgtattggtctttccgcgaatcagatcaatggcggttcgattaggggtataatccagctccttcatcacttgattcacaagacgccttttctcctcagatacgtacggatgtcggtttaatacgcgtgatacggtggccaccgacacattcgccagtttcgctatctcttttatatttgccatgtgctcctccattttcggtgataaaaaagcagcaagagtggatttctcttactgctatctcatcataaatccaatgtcatttcaacagggcaatggtcagaacccatgatatcggcacaaatggccgcttggctgatccgctgcttcagtctgtctgaaacaatgacgtaatcaagccgccagccgatgtttttctcacgtgcgttcgtcctgtaagaccaccaggaatacgcgccttcctggtcaggatataaatagcggaatgagtcggtaaatcccgcgttcagcagggcgctgaacgcttcccgctcctgctccgagaaaccggcgttcttccggttggctttcggattttttaagtctatctccctgtgtgcgacattcagatcgccgcataagatcacgggcttcttccggtcaagcttctgcagataatccttaaaatcggcttcccattgaagacggtaatcaattcgctctaatccgcgtttggcattcggcgtataacagttgacgacaaacacatgctcaaattcaagcgtgatcacccgtccttcttgatcatggtcgtcaatccccagtccatagaacacgtgcagcggcttttctttcgaaaaaacagccgtgcctgagtagccttttttcaccgcatagttccaataggcgtgatatccttcaagctgtaatgatacttgtccgtcctgtacttttgtttcttgcagacatagaatatcggcttccgtttcctgaacgtaagtattgatatctatctttttcatcacggcacgcaagccgtttacattccaagaaatcagtttcatgtgatccctcctgtccggctcagccggtatttcagtgtttcaatgtttccgccctctaatgccagcagctgctttttcatttctaaaccgcctctgaacccggtcagtttcccgttttttccgatgacgcgatggcacggaaccgtaatcaataccggatttttcccgattgcggcgcccacggctcttacggctgccggtttctgaatcatttctgctatatccgaataggagtatgtctcgccgtacggtatgtccataagcgctttccatacagcaagctgaaattctgtcccgtaaagatccaccggcactgaaaaagctgatctgccattgtcaatgtactcggacagctctgccgtataaggcgccagcttttcatcatcacgtgccaatcggtattgcggcagtgatttttttgcccactgctcaaactcttcaaagcttccataatttgagcctataaagcaaagccccttagatgtggcggctgtataaaggctccaatcattccgtgtgaagagtgtccaatagatcataggctctttactcatattgaacctccctgtcccattttgacggtttttcggtattctgtgggcgaactcccggttctctttttaaaaagagtcgcgaaatgcgctgtgtttggaattccgacagtcagagcgatctccatgactgtcatatcagtatgctttaaaaggtgttccgccttcgacaatcttattttctgtatatacgcaatcggggatattcccctgatttttttaaatgtccgctgtaaatgataggggctgccgtgacacatttcggccagtacgctcagagtcagggattcgtgataatggcggtcaatgtactcaatgatttgagcaatccattcttcatcaggaagacgaagaccgttcggccggcaccttttacagggacgaaaatgtctctcgagcgctgcatcagccgtatcaaacaccagcacgttttctttattcggaactctcgatttacaagaaggccggcagaaaatccccgtcgtttttactgcataataaaatgccccgtcataagaagcatcattgtgtatgattgcgctccacctttcatcagtcaggatatttctgtctgtttccatctcagccaccccctgttcttcagtataaacaaattcattgcttaagtacgcgtttttgaatagaggagcaagataacaaagataggtgtcaggagcacttccatgtttcatgtgaaacatttcggcaggatggagggggattgatataaaaaaagagcaggagcccgcaggctcttgctcttttctttcggcttactcgccagttacgtatggaagtaaagccatttgacgtgcgcgtttgatcgcgatagtcaatttacgttggtatttcgcgtttgttccagttacacggcgaggtaaaattttaccacgctcagaaacaaactttctaagaagatctacatctttgtaatcgatgtgcgtaatgccgttagaagtgaagtaacaaaccttacggcgtttcgcacgaccgcctctgcgtcctcctgccattgtcatttcccacctttctcgttatgaatatagcgataatctattagaacggaagatcatcatccgagatgtcaatcggcttgccgtcgttggcaaatggatcatcattaaagctgttcccttgatttcgtctctggttgttctgatttccgccgaacggattatcattttggcctccgccaaagtattggcctccgccgctgtttccttcgttgtatccgcctgatccagaaccgccgctgtttttaggctcaagaaattgaacactttcagcttggacttctgtcacgaagacacgctgtccctgctggttttcataatttcttgtctggagtcggccgtctacgccggcaaggcttccttttttaagaaagtttgcaacgttttcggcttgtcttctccaagtgacacaattaatgaaatcggcttcacgttctccggactggttcgtgaatgtacgattcacagctagagtaaacgtggcgacagccgcaccgcttggcgtataacgaagctctgggtcttttgtcagtcttccgactaatacaactcggttaagcatatgaaagaccaccttttaacattatatatttcaaattgcttattcttcttctttaacaacgatgtggcgaatgatatcgtcactgatcttagctaaacggtcgaattcagcaaccgctgcagcttcagactgaacgtttaagatttggtagaaaccgtcacggaaatcgttgatttcgtaagcaagacgacgtttaccccaatcttttgttccagtgatctccgctccgttagaagtcaatacgttgttgaaacgctcgataactgccttctttgactcttcgtcaatgttcggacggataatgtacataacttcgtactttttcatctgtttgcacctccttttggtctaagcggccctataatgggcaaggagcaataattctattactcacaagtttatattataccaaagctcttgtccctttacaactgtgtcctatacattaaatcggaaatgaatgacatctccgtcttggactacatattccttaccttccagacgcacttttccggcttctttcgctccggacattccgccgcctgccaaaaggtcttcataagcaaccgtttcagcgcggataaagccgcgttcaaagtcagtgtggatgatacccgcacactcaggagctttcatgccttttctgaatgtccatgcgcgcacttcctgttcgcccgccgtaaagtatgtcgcaaggccgagaagagagtatgacgctttaatcagctgatcaagacctgattcttcgatgccgagctcctcaaggaacatttgcttttcttcgccttccaattcagcaatttcagactcaattttcgcacagacgacgataacttcggcgttttcacccgcggcgtactcccggattttcgcaacatattcattatctgaaggatcagccacttcatcctcgcttacatttgctacataaagcacaggttttgacgtaagcaaatgaagctgcttcacaagcttttgctgttcttccgtaaattcaacggaacgggcaggcttttcttgttcgaaagcttcttttaatttagacagaatgtcaaattcaaaaaccgcttctttgtctttttgcttagcaagcttgctcacacgcgtgatgcgtttttcgactgtctccatgtcggcaagaatcaattcaagattgatcgtttcaatatcgtcaatcggatcgactttccctgacacgtgcgtaatattgtcatcagcgaatgcgcgtacaacgtggcagatcgcatcaacctgacggatatgagaaagaaacttatttccgagtccttcaccttttgatgcgccttttacgatccccgcgatatcagtgaattcaaacgcagtcggcaccgtttttttcgggttcaccaattcagtcagcttttgcagacgttcatccggcacttccacgattcccacgttcggatcaattgtacagaacgggtagttggctgattcggcaccagcctgggtaattgcattaaataacgtcgattttccgacattcggcaaaccgacaattccagcagttaaagccattctttcatctcctctatatcaaaccatcatcgtataaacgtattgtaaacctagagcaattataaggaggttcataggaaaagacaagctgagaaaaaagcatttcccgccctctctctccttagattatccttttttaaccgctaccagacagtcaaaaagcgtacttcccattccattatcggaatttgaatcctttgtgagcatgttgacggagcctccgaatgccgcccacatgccttcatctatattcaccgtcttcggatgagcctgcttcatgattttcaccctgccgcgcagacggccgcggtcattgtacacctctgccgtatctccgtcttgaagtgaaagctcctcggcgatatccggcgacagatccacctgaatctgctgaagcttttcaataaacggcacgtgctgtgaatgattggagcgctgcgggtgaatggacagcagcgtatacggatatttcccggccagtccggcgtcatgataaacagactcctccggcacctccaattgagggaggccgctgtatcctttctcttctgccagtgacgagacgaattcaaattttccgctcggggttaaaaattgaaaatcactccacggaacctgtttgaccggaagcggcatatgtcctttttcttttaattgctcaagggtgattccttctttctccaaagaagagagccccatttttaagaaatcttccgtactgtaatcaaacagctccccgaatccgagacgctttgcgagttccgtccagatccagcggtctgattttgcctctccctgcggttccgcaagcttcttgccatattgaacatagtgatgatacatgctggaataataaatatcttcctcttcgaaaacaacggccgtcggcagcacatagtcacagagcttcgccgtatcggtcatgaccgaatcaatggccactgtgaccggtgttttttcaaatgcttccttcactttttttgtattcggcacctgtgtcagcggattgccgcacgtcacgatgatcatttcaatcggcggatcggctgcattcagcgcctcttcggcttgagtcatcatcgaaaacgttctcgaacttttcttcagatcaggacgggtgagctcggcctttgcaaagctttcaccgacttgcacatttccgaagtttgcgccgccgcctttgataccgacatttccgctcgccgcagctaaagcgtcaatccaccgtatcgtcccgcccccgtttttatatctctgcatcccaagacccataaaagtggaggcgggaccgtcagcatataaatcagcaagatattcaatcacttctaaagacgtttctgttttctcaatgatctcctcaatagaaatcgtctgcagaagcttttctatttcttcaaaaccgaccgaatgcctttgaatgaaatcgaaatcggttctgccggtttggcataatatttttaaaacacccgccgcaagccagccatccatgccgggtttaacggatatataccgatcggcaagcttggcagtcgggttaaaaataggatcaatgaccgtcagtgtcgctccttttttcttcacctgctgcagatgatgatagaggtgcatattcgtccgggacacgtttctgccccatacgatcacatgcttgctgtgataaatatcaagcggtccatgcccgtaagaacgcccgaaatcccagcgctgcgcttcaatgccggaaccccagcaaatgctgcccgcaatctccgtcacaccgccgtatccattgaaaaaacgctggtcgagcgccttcaaaagaccgttattggcgtaatcatgactgtgcagcactgcggcagtgcccaacgtctccttaatcaccgccattttttcagcaatttcatctaacgcctgctcccaggaaatgcggacaaattcgccgtctatcttttttaaaggaaaacgaagccgttccggcgcattcgttttcgcctccagcattctgccacggccgcaaattttcccttccgtaatgggatgattcgggtctccgtctactttcgtcacctttccatcctcaactgtcaccaaaaagccgcagctgtcccagcaattcagcgggcacgctgactgatgcactttgctcatcgggcctcttcctctcctctatatgaaaaagcatgagcgccagcccttatgatgcaggctcctcatgcttgacgagtacttttttcagctttctctcaaaatctcttctcggaatcatgacactgtgggaacaacccgtgcatttaatccgaatatccattcccatccgaatgattttccacctgttttcaccgcaaggatgcggtttcttcatttcaacaatatcattcaggccaaagtctttatccgccaagacccttcacctctctccatagactgctttatttattgtacaaaaaaagacaggataagagcaacggccgcactcaaaatgagcattatacttttttccatctccctaaaatagggtaaagaagaagacataccagcaaataaagacttaaaagcccgtaaatgggatataaaatcgcgatcaaatctgaaaaaccgattgtcgtaaaaggcaccatcacagctaaaagaagagatacgagcgtccatctcggcaatttcacaaatgcaagcatgcggctggacagcccgaacagaccggtcacggttgtcgtatagatggctaaaaaaagcacggcggccatacaaagaaataacggataaggagcgccttcaaggacggcgaaaagaggaatctcatattgtgtaagactgcctgaaagctgtacaagcgtttcattgtaaacaaatgaaatcataccgaaaatcagcccgcttgcaacgcttgcgattttcgcttctcccagtcccttcatatcttttccgattgaagaaagaacagcgacaacagaaaggatgtttaaggacgtgaaggtaatgcttgccggccaattatactggcgggtcaaatctatcgtccacgtgtaatgatgggttgtctgaaaaaagaccaatgcatataacagccccgctacaagaatcggtatcaaaatactattcagagatagtattccttttatatcccaaaagaataaaccgacagtcacaatgcaaagaagaaaaataccgatccaaaatggcagcttgtacatttgcagcgtcacaccgccgccggcaatcataaccatcgtcattgaaaacaaataaaacataataagcacatcatagactttagcaagagccggccccatcagatgctcaagcacaggtaaaaagtgcgttgattgaacccgatagctgatcttcaacacaatataagccgaaatcgtaaacatgactgtaaacaatacaatagccagtccgctttcgacaccgaaaaactgccatatttcctgcccgcttgcatatccagccccaatctggctgcttaatatgagcagcatccacttcatcccggctctccacaccctcatcacctcataaaatttcagataatctccgcatattgctactatattgagtgacaacggcaatcattcatacaaaagggacaaatatggtatgataacgacgattgactattcagaaaaatttacttatgcaaggagctcaaaccatgtacatcaggcgtttaaccgcaaatgatacccagccttattccgatatcaggctcaaagctttaaaagatcacccagacgcatttgccgtcagctacgatgaggagaaagaatggccgtccgaaaaatttaaagccaggcttgaagccgacaatgccatcgtgcttggcgcctttgaaaaagacagactgataggaatcctcaagatctccaagcatccgctgtttaaactaagacacattgcggttatcggttctatgtatatttcccccaaacaccgagggtcaggcgcgggaaaagctttaatgacggaagccatcagccgagcaaaaaagatgaaggacacagaacagctccatctctctgttacctcaacaaatgaacccgcaataaaactctacgctcagttaggatttatcctcttctctacagaaaaaagagcgctgaaattagatcatcagcgatatgttgatgtagatcaaatggtcttatttctttcatgaacttagagaataactgctctgggttcttttttctatcccgctcttttcaaacaaccggcatgctgatcatggcataagcataaaaaaagacagcgctggatatactgtaaacaaccatacatcaccaaaaacaacaatgtaatactcgtatgacatgacaaggaagtgaaccttatgaatcgaaaaggcgggcttttttctcaagaacgggcaaaacaatatgtatctcatacggattcttctgctgcgaatcaaatacaagcgatccttacttcatctttacgtaaagcagccggcagaccgttagtcaccgtgtgtatcggcacagatcggtcgaccggagattcattaggtccgctcgtaggaacaaagttagaaaaaatgaatttaggcagattgcacgtttacggcacgctgtcagatcctgttcacgccgtcaatatgaaagacaagctgaaagatattcaacatctacataaaaatccgtttattatagcggttgatgcttgtttaggccgcgtcaaaagcgtagggtcatttcaaatcggcgatgggccgctgaagcccggagcaggtgttcaaaaagatcttcctgaaatcggtgacgtccatatcaatggaatcgtcaatgtcagcgggtttatggagtattttgtcctgcagaatacgaggcttcatcttgttatgagcatggcaaatgttttagcagaggggttacagctgacagataaatcagaaggccggcaggaacggctcagtccgtttcataagttgacaagacgtatataaaaaaccatctttttttaaaaagatggtttttacgcttctctttcagacaatagttctaggatacgttcaagatcttcatttgagaaaaactcaatctcaatcttcccttttttcttttgtctctttatatttactgttgttccgaaataattttgcaaatacgattcccgctcttttaacacaacatcttgaacaggttcttttttctttgtttcacgtggaacattgttgtttaactgctgaatcagctgctcaagctgacggacgttcagctgttcttcaaccactttcttcacaagcggctcaagcttgtctttatttttcaaaccaagcaaggttctgccgtgtcccatggataacgtaccttctgcaatgaggttctggatgctttccggcagcgtcagcagtcttaaatggttggcaatatgaggcctgcttttcccgagccgtttagcgagctgttcctgggttaaatccaaatgcttcagcagtgagtcatatgccagagcttcttcaagcggtgataagtcttcacgctgaaggttttccaaaagagcgatttcccgcatcagcgattcagataaatcccgcacgatagccggcactgtctctttaccggcaagttttgcggcgcggtaacggcgttcgccggctacaatatcatagcccttcaatgattttctcacgataatgggctgaagaatgccatgctgaatgatagattccttcagttcagctaatgactcatcgtcaaattgttttcttggctgataaggattggggcgtaaatcactgattttaatctcttccactgtctcttcagacaaatcaacctgattaaacaacgcgttaatcccttttccgagcccgcctttagccattcgctgccacttcctttgctaaatctaaatatacttccgcacctctcgaacgcggatcgtataatatgatcggcttgccgtgactcggcgcctcacttaaacggacatttcgaggaataatggtttgatacactttatctctaaagtatttctttacctcttctatcacttgaatgccgagattcgttctggcatcaagcatcgtcagaagcactccttctatcattaaatcggtatttaaatgtttttgcacaagccgaactgtatttaataattgactcaatccttcaagagcgtagtattcgcactgaaccgggataacgactgaatctgaagcggtaagcgcattaatcgttaataacccgagagacggaggacaatcaataatcatgtaatcgtaattttgtttcactgattctaatgctcttttcagcctgacctcccgtgagatcgtcggaaccaattcgatttccgctcccgcaagctggatcgtggccggaatgacatctaagttctctactgaagtcggtttaataatatctgtaacatctgcatcatctactaaaatgtcgtacacacaatgatccacatcggctttttcaatccctaatccgctcgttgcattgccctgcggatcaatatcaacaagaagaacccttttacctatgtaagccaagcaagcccccagattaacagaagtcgtcgtcttcccgactccgcctttttggttcgtaattgctatgatttttcccacgatgtcacctaccttcacatgaacatgtactgtcttgtttctatcttatcaaaaaaagagtaaagcgttttatttttttcataatttgtttatcagcaagtgaaaaaaatgtaaacggaaaagacactttctaatataagttctccgataaagtgacttttttgactgtaaaaagacaattcacgacacaaaaagataaaattttgcatatataatgtatagtgcacaataaatctatcattatctcaaaatagttttttgattaaaataaaaactcccctgctgatcaggagagtttttatttaggtatccgaatggtaagctggatgtactcttcgaattcttcttcttcagtattcagtctgacgccgctgtcttctaccatagacagtgactgacgaatcgtattcatcgcaattcttgtatccctgctgaacgctttgcgtctcggctttggtttctgcttattctgttcaagcattttcaccactctgtcttccgtctgcttgacgtttaagcttttctcaatgatttccgcaagcaatgtaacctgaaactccggctgtttgagcggaatcagtgctcttgcatgacgttccgtaatttttttctccataatcgcatcctggacgggttccgggagctttaacaatcggagcttgttcgcaatcgttgactggccttttcctaagcgctgcgccaaggcttcctgtgttaaatcatgaagttctaacagccttgcgtacgcatgagcttcctcaatggaggacaattcttccctttgcaggttttcaatcaaagcgacagatgctgtttccgtatcagaaaaatctttaataattgcgggaatcttctcccattcaagcgtctgtaccgctctccagcgcctttcacccgcaatgagctcatattgtccttcatcttctgtatgtctgacaacaatcggctgaatgatgccgtgtgtatggatagtcattgctaactctttgattttttcatctgagaaaatggtgcgtggctgaaaacggttgggaacgatagcatgtaccggtatttcgagtatctcttctttgtttgtatcatgctcagctatctccggttcctcttccttctcaccaaacccgaagaaacgagagaatgaatgcttcatgtacctacaccacctttaaaaactgccatttttataattctattttctcatggtttttcctgctgtatcttcatcaattttgcagaaaatatgatggaattgtcacatcaggctgtctaaattacccttcaattggcgatttatttggagtacccggttttctcggatattttttcggagtgcttttcgtcttgcgaatgatcatgatgttccgttcactttcttcaactggaagtgtaaaggaatgaacttgttcaagctctcctcccaatactttaatcgccttttgccccgctttcagctcttcatcagctgctgctgcttttagtgcggcaaatacgccgtttttcttggccagcggcagacaaagctcactcaggaccgacagacgcgccaccgcacgggccgtcacgagatcgaagctttcccgtacgtctttccgctgtccgaatgtctccgctctgtcatggacaaatgtcgtatgctctaattgtagagcatcagagagagtttccaaaaacgtaatccgcttattcagtgaatcgacgatggtgacatgcagatgcgggaagcagattttgatgggcaggcttggaaaaccggcgccggcgccgacatcacaaagagtggtgaccttttcaaaatcaatataaaatgccgccgttatcgaatcataaaaatgcttgagataaacttcctttttctcagtgatggatgtcagattcattttttcgttccattccacgagcatccggtaatacaactcgaattgctccagctggcggtcagaaagggaaatccctttctccgctaaactggatgtaaattcctctatattcatgccgtcatcctttctattcagctaccttggcaatacggccctgctccaggtataccagcaggattgaaatgtctgccggattgacgccggaaatacgggacgcttgagcaactgataaaggacgcacttctttcagcttttgacgggcttcagtagcaattcctttaatggcgtcataatcaatccgatcagggatttttttgttttccattttcttcagcttttccacttgctgcaaggatttttcgatatatccttcatatttcacctgaatttccacttgttccgccacatcttgcggaaccggagaatctgcaggcgcaagttttgtcactgtttcatagttcatttccggacgtttcattaaatctgtgccgcgcactccgtctttcagctcgcttccgccgagtgaacggatatattcctgattctcaggagacggcttgataataacagaccagagacgttttttctctgcctcgatcgccgcttttttcttctcaaacgcttcatagcgctcatcagaaattaagccgatatcgtggccgatttccgtcagacgaagatccgcgttgtcgtgacggagcagcagtctgtattccgcccgtgaagtcagcagacggtacggttcattggttcctttcgttaccaaatcatcaatcaatacaccgatataagcatcggaacggctgaggatcacttcttcttttccaagcgctttgcggcctgcgttgatccctgccataattccttgcccggctgcttcctcataacctgatgtaccgttaatttgaccggctgtgtacaggttagggatttttttcgtctccagtgtaggccagagctgcgtcggtacaatcgcgtcatactcaatcgcgtatccggctctcatcatctgcaccttttccagtcccggaatggtcgccagcatccgctgctgcacgtcctcaggaagactcgtggataaaccttgaacgtatacttcctgcgtatttctgccttccggctcaaggaaaatctgatgacgcggtttatcattaaaccgaacgactttatcttcaatcgaagggcagtatctcggtcccgttcctttaatcataccggaatacattggcgaacgatgcaggttgctgtcgatgatctcatgagtctcaggactcgtgtaagtcagccagcaaggcagctgatcggtaatgtattcaaccgtttcatatgagaaagcgcgcggaaccgggtcccccggctggatttctgttttgctgtaatcaatggaatcgcttgagacacgaggaggcgtacccgttttaaaacggacgagatcaaaaccgagctcctctaagtgctcagaaagtttaatagacggctgctggttattcggaccgcttgagtaagacaaatcaccgagaatgatccgccctcttaaatacgttccggttgtcagcacgaccgtttttgccttatattcagcaccggtttgcgtaatgacaccgcggcactccccgtcttcaatgattaaacgctcggcaatcccttgaagaagtgtcaaattcggtgttttttccagcgtatgcttcatttcgtgctgatattggaatttatccgcctgcgcacgcagcgcccgtacggccggaccttttcctgtattcagcattctcatttgaatatgagttttatctatatttctagccatttctccgccgagcgcgtcaatttcgcggacgacaatccctttcgcggggccgccgacagacggattacatggcataaacgcaaccatatcaagattaatcgtcaaaacaagcgttttggctccctggcgcgcggatgcgagggcagcctcaacaccggcatgcccggcgccgatgacaatcacgtcgtattggcctgcttcataccccatggttttttcctcccttttatttacctaaacaaaattgtgaaaagagctgatcaattaagctttcgtggacggcatcaccgatgatttcgcccagcagttcccagcaccttgtcaaatcaatttggaccatatcaatcggaacatcctgttcaattccgttcagcgcatcatcaatcgcttgctttgcctgatgcagtatcgagatatgacgggtgttgctgacataggtgagatctccgctttcgatcgctcctgtataaaatagcgactgaatcgcttcctctaaatcttgaatgccttcttctttcagcaatgaggtcgtgacgacaggccggcctttcgccagttccttgacgcgctcagcgtcaatcttagcctcaaggtccgtcttattcataatgacaatgacatccattccctcaaccgcttcaaacaatttcacatcttcttcagaaagctcttcgctgtggttaagcacaagcaaaatgagatccgcttccttcagaacctgccgtgaccgttccacaccgattctttcgacgatgtcttctgtctcacggattccggcggtatcgacaagccgaagcggcacgcctcggacattgacatattcctcaatcacatcacgcgtcgttcccggaatatcggttacgatcgccttcgtttcatggacaaggctgttaagcagagaggattttccgacgttcggacggccgatgatcacggtagacagtccctcacgcaaaattttcccctgctcagacgtacggagcagcgcctcgatttctttcttcacgccgcttgccttctccactaaaagctgatgcgtcatttcttcgacgtcatcatattccggataatctatattaacctcaacatgggcaagtgtttctaacaactcatcacgcagacggcggacaagcgcggaaagccgtccttccatctggttcatggcgacattcatggcacggtccgttttggccctgatcagatccatcaccgcttccgcctgtgataggtcaatccgtccgtttaaaaatgcgcgcttcgtaaactcaccgggttctgccagtctcgcaccttctcttaaagcaagctggagcacctgattaactgtcacaatacctccgtgacaattgatttcaatgacatcttcccttgtgaatgttctgggcgctcttaaaacagacaccatgacttcctcaataatccgtcccgtcgtgctgtccgcgatatgcccgtaatgaatggtatgcgattctgccgaactgagcgttttgcctttcggacccttgtacattttgtcggcgatctctacggcttccgggccgctcagccgaacgatcgcgatcgcgccttcacccatcggagttgaaatcgctgcaattgtatccatgctgttcacctctctttatctctgtttccatctatataaaaaattttatttacgccaaaattaaaagataacatagtttggtttgaagtggaagatacgttatccacaaaggcagaaattcatcccttattactttaacttatccacatgtgaataacaattaattttatttcctaaaaccttttttatcaacagcatagaccgaaaaagaaaaaacttaaacgcaaaaaatgcgattctgcttaggaatagagccatttttaccaataaaaaaaccgaagttccgattttacccggacttcggttttctgctatctttatgggaaataacgagatggcggtaccggccttcaccggtagaaaacgttttgatatttggatgctttgacagagcatcatggatgatttttctttcacctgacggcatcggttctaaatgcacatcttttttcgttttcgacacttgcttggccagcctgtttgccagctgatccagaatttctcttcttttccgccgataattctcagcgtcgacaacggcttggcgatactggcctgagccgcggttcaaaacaagctgcgtcaatgtttccagggcattgagtgtttgtcctcttttgccaataagcagcgccgctttttcacctttaatgtgaaaacagactgttttcttgttttcttccgtaacaatctcagaaggcccggcaatggaatggatgatttcttccaaatacactttcgcttcatgaacaggattttttttctcttccagttctacgatcgcattcttttttccgaaaatacccaaaaaccctttgtattcttcttgcaccaccgttatttctacttgatctttcgtcagttgaagttcctgaaggcctgattgaactgcttcttcgacattccgtcccgcagcagtcaccttcttcactttttctttcctcccgctttctgcgtttccggatcgtgtttaatgtcaggtcctttaataaggaatgtctgagcaatcataaacaggtttccgactacccaatacagagaaagcgcgctcgggaagttgatcgcaaatacgataatcatgatcggcataatccataccatcattgccatttgaggattctgagtcggatttccggccatcatcagcttctgctggacaaaagtggccacaccggcaacgataggaagaatatagtaaggatccttctctcctaggtcaaaccataaaaagctgtgctgtgaaatggcttgcgtacgcataatggcgtggtagaatccgatcaaaatcggcatttgaatcaggatcgggaaacatcccgccagcgggtttaccccgtgctttgaaaacagggccatcgtttcctgctgaagcttctgctgcgttttttgatctttagagctgtatttttctctgagcttctgcatttcaggctgcagcgcctgcattgcttttgagcttcgaagctgcttgatcatcagcggcagaatcagcagacgaattaaaatcgtaacgatgatgatcgataaaccatagttatcgcccgtcagtttcgctacgtacgtaataacttctgacaatggatacacaacatatttgtcccagaaatgcggactattcgccgtaatcggctctttcacactcgagcacccggccagcagcacgagcataccgaccatactcagtagtaaccatattctccttttcaagaacgtttcctcctataccaatctttatgaaccttgtatgtattttagcatctttcagtttcaaatggcgttcatttttcgccaaataaaaggaagcgcttttaaaaacgtgaagaaaacaaaatatgagctattttgacgaagatttcttatataatgaggtttttctgaataagtgctgcagactctttttcgtttcttcaaaactgaggtcgccggcgggttttcttgcgataataataaaatctttcggcttgagcagctctttttcctcctgaacagcctgtctgattaaccgcttcacccgattgcgcacgacggcattgccgatttttttactgacagaaagccctacccggagctcttcctgtttcggctgatcaagcgtatacagcacgaactggcggtttgccatagacgttccgcgtttaaacactttttgaaaatcttcatttttctttaaccgatttcgcttcttcactttaattcactccgatattcactcgcagaaacttttatttctatctaaaaaaaacgggccgccggaatactgaagaaatttctccagtaccgggcgacgcatgacatctcactctcttaatgtgaaaaaagaccactgacattattcagtggcctaagctgataatacttttctgcctttgcggcgacggcgtgctaatactagacgaccgttttttgaactcatacggcttctgaagccatgaactttactgcgtttacggttattcggttggaatgttcttttcatttatgacacctccctcga

(The sequence listing continues in the following parts.)

1. The use of at least one Bacillus strain for improving vitamin E absorption in animals.

2. The use of claim 1 wherein the animal is a monogastric animal.

3. The use of claim 2 wherein the animal is a swine.

4. The use of claim 3 wherein the animal is a weaned piglet.

5. The Bacillus strain according to claim 1, wherein the strain is selected from the group of Bacillus subtilis and Bacillus licheniformis.

6. The Bacillus strain according to claim 1, wherein the Bacillus strain composition comprises a strain chosen from the group of Bacillus subtilis BMS 3, BMS 4, BMS 5, DSMZ 5750 or Bacillus licheniformis BMS 1, BMS 2, DSMZ 5749 or a mutant of any of these strains.

7. The use according to claim 1, wherein said Bacillus strain is administered in an amount of at least 10⁷ CFU/kg feed, preferably 10⁷-10¹⁰ CFU/kg feed, more preferably 10⁷-10⁹ CFU/kg feed.

8. The use according to claim 1, wherein said Bacillus strain is administered in an amount of at least 10⁴-10⁸ CFU/kg body weight per day, preferably 10⁵-10⁸ CFU/kg body weight per day, more preferably 10⁵-10⁷ CFU/kg body weight per day.

9. A method for improving vitamin E absorption in animals, said method comprises feeding to the animal at least one Bacillus strain.

10. The method of claim 9 wherein the animal is a monogastric animal.

11. The method of claim 10 wherein the animal is a swine.

12. The method of claim 11 wherein the animal is a weaned piglet.

13. The method according to claim 9, wherein the strain is selected from the group of Bacillus subtilis and Bacillus licheniformis.

14. The method according to claim 9, wherein the Bacillus strain composition comprises a strain chosen from the group of Bacillus subtilis BMS 3, BMS 4, BMS 5, DSMZ 5750 or Bacillus licheniformis BMS 1, BMS 2, DSMZ 5749 or a mutant of any of these strains.

15. The method according to claim 9, wherein said Bacillus strain is administered in an amount of at least 10⁷ CFU/kg feed, preferably 10⁷-10¹⁰ CFU/kg feed, more preferably 10⁷-10⁹ CFU/kg feed.

16. The method according to claim 9, wherein said Bacillus strain is administered in an amount of at least 10⁴-10⁸ CFU/kg body weight per day, preferably 10⁵-10⁸ CFU/kg body weight per day, more preferably 10⁵-10⁷ CFU/kg body weight per day.

17. An animal feed composition comprising at least one Bacillus strain of claim 1 or compounds obtained from the Bacillus of claim 1 for improving vitamin E absorption in animals.

18. The feed composition of claim 17 wherein the animal is a monogastric animal.

19. The feed composition of claim 18 wherein the animal is a swine.

20. The feed composition of claim 19 wherein the animal is a weaned piglet.

21. The feed composition according to claim 17, wherein the Bacillus strain or compounds obtained from the Bacillus is present in a concentration of at least 10⁷ CFU/kg feed, preferably 10⁷-10¹⁰ CFU/kg feed, more preferably 10⁷-10⁹ CFU/kg feed.

22. The feed composition according to claim 17, wherein the feed composition further comprises one or more ingredients from the group consisting of a carbohydrate source, a protein source, a lipid source, ash, water and any combinations thereof and wherein the vitamin E content is reduced below 95%, preferably below 90%, preferably below 85%, preferably below 80%, more preferably below 75%, more preferably below 70%, more preferably below 65%%, more preferably below 60%, more preferably below 55%, more preferably below 50%, more preferably below 45%, more preferably below 40%, more preferably below 35%, more preferably below 30% of the recommended standard values in animal feed.

23. The feed composition according to claim 17, wherein at least one further ingredient selected from the group consisting of: proteins, carbohydrates, fats, further probiotics, prebiotics, enzymes, vitamins, immune modulators, milk replacers, minerals, amino acids, acid-based products, medicines, and combinations thereof and wherein the vitamin E content is reduced below 95%, preferably below 90%, preferably below 85%, preferably below 80%, more preferably below 75%, more preferably below 70%, more preferably below 65%%, more preferably below 60%, more preferably below 55%, more preferably below 50%, more preferably below 45%, more preferably below 40%, more preferably below 35%, more preferably below 30% of the recommended standard values in animal feed.

24. The feed composition according to claim 17, wherein at least one further ingredient selected from the group consisting of: corn, Soybean meal, Soy protein, Potato proteins, Lactoserum, Soybean oil, fish meal, krill meal, soya concentrate, corn gluten, wheat gluten, pea protein, wheat flour, fish oil, a vitamin, mineral premix, mineral premix plus synthetic phosphorus and combinations thereof and wherein the vitamin E content is reduced below 95%, preferably below 90%, preferably below 85%, preferably below 80%, more preferably below 75%, more preferably below 70%, more preferably below 65%%, more preferably below 60%, more preferably below 55%, more preferably below 50%, more preferably below 45%, more preferably below 40%, more preferably below 35%, more preferably below 30% of the recommended standard values in animal feed.

25. The feed composition according to claim 17, wherein the feed composition comprises from 15-30% (w/w) of a protein source.

26. The feed composition according to claim 17, wherein the feed composition comprises from 65-80% (w/w) of a carbohydrate source.

27. The feed composition according to claim 17, wherein the feed composition comprises from 3-5% (w/w) of a lipid source.
